(19) United States
(12) Patent Application Publication
(10) Pub. No.: US 2026/0125465 A1
(43) Pub. Date: May 7, 2026

(54) VHH POLYPEPTIDES THAT BIND TO MESOTHELIN, COMPOSITIONS AND METHODS OF USE THEREOF

(71) Applicants: The Broad Institute, Inc., Cambridge, MA (US); The General Hospital Corporation, Boston, MA (US); Dana-Farber Cancer Institute, Inc., Boston, MA (US)

(72) Inventors: Robert Manguso, Boston, MA (US); Gabriel Griffin, Boston, MA (US); Nelson Knudsen, Cambridge, MA (US); Hans Pope, Cambridge, MA (US)

(73) Assignees: The Broad Institute, Inc., Cambridge, MA (US); The General Hospital Corporation, Boston, MA (US); Dana-Farber Cancer Institute, Inc., Boston, MA (US)

(21) Appl. No.: 19/415,348

(22) Filed: Dec. 10, 2025

Related U.S. Application Data
(63) Continuation of application No. PCT/US2024/034108, filed on Jun. 14, 2024.
(60) Provisional application No. 63/508,189, filed on Jun. 14, 2023.

(51) Int. Cl. C07K 16/28; A61K 35/17; A61K 39/00; A61K 40/11; A61K 40/31; A61K 40/42; A61P 35/00; C07K 14/705; C07K 14/725; C12N 5/0783

(52) U.S. Cl. CPC C07K 16/28; A61K 35/17; A61K 40/11; A61K 40/31; A61K 40/4202; A61P 35/00; C07K 14/7051; C07K 14/70517; C07K 14/70521; C12N 5/0636; A61K 2039/505; A61K 2239/13; A61K 2239/17; A61K 2239/22; C07K 2317/565; C07K 2317/567; C07K 2317/569; C07K 2317/92; C12N 2510/00

(57) ABSTRACT

Single domain VHH polypeptides (antibodies) that bind mesothelin, VHH polypeptide products, methods, cells, pharmaceutical compositions, and kits. The VHH polypeptides may be recombinantly produced and expressed. Provided are also chimeric antigen receptor (CAR) polypeptides comprising the VHH polypeptides and CAR immune effector cells comprising the expressing the same.

### CROSS-REFERENCE TO RELATED APPLICATION

[0001] This application is a continuation under 35 U.S.C. § 111(a) of PCT International Patent Application No. PCT/US2024/034108, filed Jun. 14, 2024, designating the United States and published in English, which claims priority to and the benefit of U.S. Provisional Application No. 63/508,189, filed Jun. 14, 2023, the entire contents of each of which are incorporated by reference herein.

### SEQUENCE LISTING

[0002] This application contains a Sequence Listing which has been submitted electronically in XML format and is hereby incorporated by reference in its entirety. The Sequence Listing XML file, created on Aug. 13, 2024, is named 167741-051801_PCT_SL.xml and is 4,390,573 bytes in size.

### BACKGROUND

[0003] Mesothelin is a glycosylphosphatidylinositol-anchored cell surface protein that has been identified in many different neoplasias, including lung adenocarcinomas, ovarian carcinomas, and hematological malignancies, including acute myeloid leukemia (AML). Chimeric antigen receptor (CAR) T-cell therapy is one method for treating a neoplasia associated with mesothelin. However, to develop effective CAR-T-cell therapies, it is necessary to identify antigen-binding domains suitable for use in targeting the CAR proteins expressed by the CAR-T-cells to neoplasia cells surface-expressing mesothelin.

[0004] Accordingly, there is a need for improved antigen binding domains capable of binding a mesothelin antigen.

### SUMMARY

[0005] As described below, the disclosure provides single domain VHH polypeptides (nanobodies) that bind mesothelin, VHH polypeptide products, methods of use, cells, pharmaceutical compositions, and kits. The VHH polypeptides may be recombinantly produced and expressed. Provided are also chimeric antigen receptor (CAR) polypeptides comprising the VHH polypeptides and CAR immune effector cells comprising and expressing the same.

[0006] In another aspect, the disclosure features a VH-heavy chain only (VHH) polypeptide or an antigen binding portion thereof that specifically binds to mesothelin. The binding protein or the antigen binding portion thereof contains three Complementarity Determining Regions (CDRs): CDR1, CDR2 and CDR3, which are structurally positioned between four camelid VHH framework (FR) regions (FR1-FR4) as follows: FR1-CDR1-FR2-CDR2-FR3-CDR3-FR4. The three CDRs are selected from: CDR1 containing the amino acid sequence GRTFSSYA (SEQ ID NO: 1); CDR2 containing the amino acid sequence ICWSGGNT (SEQ ID NO: 2); and CDR3 containing the amino acid sequence NERTTVLPTGAMDY (SEQ ID NO: 3); CDR1 containing the amino acid sequence GSMFSINA (SEQ ID NO: 4); CDR2 containing the amino acid sequence MTSGGST (SEQ ID NO: 5); and CDR3 containing the amino acid sequence NGGWSLAMDY (SEQ ID NO: 6); CDR1 containing the amino acid sequence GFTLDYYA (SEQ ID NO: 7); CDR2 containing the amino acid sequence ISSSGGST (SEQ ID NO: 8); and CDR3 containing the amino acid sequence AAAGGYGNSSRY (SEQ ID NO: 9); CDR1 containing the amino acid sequence GSIFSVNA (SEQ ID NO: 10); CDR2 containing the amino acid sequence INTGGGST (SEQ ID NO: 11); and CDR3 containing the amino acid sequence AAEDFGNSKTY (SEQ ID NO: 12); CDR1 containing the amino acid sequence GFPYFSCC (SEQ ID NO: 13); CDR2 containing the amino acid sequence ISSDGST (SEQ ID NO: 14); and CDR3 containing the amino acid sequence AASPRQLGPYYAMDY (SEQ ID NO: 15); CDR1 containing the amino acid sequence GFTLDNYA (SEQ ID NO: 16); CDR2 containing the amino acid sequence ISSSGGST (SEQ ID NO: 8); and CDR3 containing the amino acid sequence AGVGDYGRRA (SEQ ID NO: 17); CDR1 containing the amino acid sequence GFTFDDSD (SEQ ID NO: 18); CDR2 containing the amino acid sequence ISSDGST (SEQ ID NO: 14); CDR3 containing the amino acid sequence RTMASRIGC (SEQ ID NO: 19); and any set of CDR1, CDR2, and CDR3 sequences listed in a row of Table 3A.

[0007] In another aspect, the disclosure features a method of detecting mesothelin or a fragment thereof in a sample. The method involves contacting the sample with at least one detectably labeled VHH binding protein or an antigen binding fragment thereof that specifically binds to mesothelin or a peptide thereof. The binding protein or the antigen binding fragment thereof contains three Complementarity Determining Regions (CDRs), CDR1, CDR2, and CDR3 structurally positioned between four framework (FR) regions (FR1-FR4) as follows: FR1-CDR1-FR2-CDR2-FR3-CDR3-FR4. The three CDRs are selected from: CDR1 containing the amino acid sequence GRTFSSYA (SEQ ID NO: 1); CDR2 containing the amino acid sequence ICWSGGNT (SEQ ID NO: 2); and CDR3 containing the amino acid sequence NERTTVLPTGAMDY (SEQ ID NO: 3); CDR1 containing the amino acid sequence GSMFSINA (SEQ ID NO: 4); CDR2 containing the amino acid sequence MTSGGST (SEQ ID NO: 5); and CDR3 containing the amino acid sequence NGGWSLAMDY (SEQ ID NO: 6); CDR1 containing the amino acid sequence GFTLDYYA (SEQ ID NO: 7); CDR2 containing the amino acid sequence ISSSGGST (SEQ ID NO: 8); and CDR3 containing the amino acid sequence AAAGGYGNSSRY (SEQ ID NO: 9); CDR1 containing the amino acid sequence GSIFSVNA (SEQ ID NO: 10); CDR2 containing the amino acid sequence INTGGGST (SEQ ID NO: 11); and CDR3 containing the amino acid sequence AAEDFGNSKTY (SEQ ID NO: 12); CDR1 containing the amino acid sequence GFPYFSCC (SEQ ID NO: 13); CDR2 containing the amino acid sequence ISSDGST (SEQ ID NO: 14); and CDR3 containing the amino acid sequence AASPRQLGPYYAMDY (SEQ ID NO: 15); CDR1 containing the amino acid sequence GFTLDNYA (SEQ ID NO: 16); CDR2 containing the amino acid sequence ISSSGGST (SEQ ID NO: 8); and CDR3 containing the amino acid sequence AGVGDYGRRA (SEQ ID NO: 17); CDR1 containing the amino acid sequence GFTFDDSD (SEQ ID NO: 18); CDR2 containing the amino acid sequence ISSDGST (SEQ ID NO: 14); and CDR3 containing the amino acid sequence RTMASRIGC (SEQ ID NO: 19); and any set of CDR1, CDR2, and CDR3 sequences listed in a row of Table 3A. Also, i) FR1 contains the following amino acid sequence:
[0008] X₁X₂QLVESGGGX₃VQX₄GX₅X₆LRLX₇CX₈AS (SEQ ID NO: 20), where X₁ is E, D, or Q;
[0009] X₂ is V or L; X₃ is L or S; X₄ is A or P; X₅ is E or G; X₆ is S or T; X₇ is S or T, and X₈ is A, T, or V; ii) FR2 contains the following amino acid sequence:
[0010] XₐX_{b}X₁₃X₁₄RQX₁₅X₁₆X₁₇X₁₈X₁₉X₂₀X₂₁X₂₂VX₂₃X_{c}, where Xₐ is I, M, or V; X_{b} is A, G, or S;
[0011] X₁₃ is W or Y; X₁₄ is F, H, or Y; X₁₅ is A, I, or X; X₁₆ is P or S; X₁₇ is G or T; X₁₈ is D, K, or E; X₁₉ is D, E, or Q; X₂₀ is C or R; X₂₁ is E or N; X₂₂ is F, G, L, or P; X₂₃ is S or A; and X_{c} is A, S, T, or Y; iii) FR3 contains the following amino acid sequence:
[0012] X_{d}YAXₑX_{f}VX_{g}GRFTX₂₄SX₂₅X₂₆X₂₇AX₂₈X₂₉X₃₀X₃₁X₃₂LQMX₃₃SLKX₃₄EDTX₃₅X₃₆YX₃₇C (SEQ ID NO: 21), where X_{d} is F, H, I, N, or Y; Xₑ is A or D; X_{f} is S or T; X_{g} is K or R; X₂₄ is I or V; X₂₅ is G, K, R, Q, or W; X₂₆ is D or G; X₂₇ is N or T; X₂₈ is K, N, or R; X₂₉ is N, H, or Q; X₀ is T or S; X₃₁ is V or L; X₃₂ is F or Y; X₃₃ is N, S, or T; X₃₄ is P or S; X₃₅ is A or G;
[0013] X₃₆ is I or V; and X₃₇ is F, I, S, or Y; and iv) FR4 contains the following amino acid sequence: X₄₀GQGTX₄₁VTVX₄₂X₄₃ (SEQ ID NO: 22), where X₄₀ is M or W; X₄₁ is L or S; X₄₂ is null or S; and X₄₃ is null or S. The method further involves measuring the level of binding of the binding protein to mesothelin in the sample relative to a control to detect or identify the presence of mesothelin in the sample.

[0014] In another aspect, the disclosure features a chimeric antigen receptor (CAR) containing an amino acid sequence with at least about 95% identity to one of the following sequences.

(SEQ ID NO: 23)
MLRLLLALNLFPSIQVTGGQVQLVESGGGLVQPGGSLRLSCAASGSMFSINAVAWYRQAPGE
QREPVAAMTSGGSTIYADSVKGRFTISRDNAKNTVYLQMSSLKPEDTAVYYCNGGWSLAMDY
WGQGTSVTVSPTPAPTIASQPLSLRPEACRPAAGGAVHTRGLDFACDPSKPFWVLVVVGGVL
ACYSLLVTVAFIIFWVRKRGRKKLLYIFKQPFMRPVQTTQEEDGCSCRFPEEEEGGCELASL
RVKFSRSADAPAYQQGQNQLYNELNLGRREEYDVLDKRRGRDPEMGGKPQRRKNPQEGLYNE
LQKDKMAEAYSEIGMKGERRRGKGHDGLYQGLSTATKDTYDALHMQALPPRAS;
(SEQ ID NO: 24)
MLRLLLALNLFPSIQVTGGQVQLVESGGGLVQPGGSLRLSCAASGSIFSVNAMGYYRQISTK
QRNLVAAINTGGGSTYYADSVKGRFTISWDNANNTLFLQMNSLKSEDTAVYYCAAEDFGNSK
TYWGQGTLVTVSPTPAPTIASQPLSLRPEACRPAAGGAVHTRGLDFACDPSKPFWVLVVVGG
VLACYSLLVTVAFIIFWVRKRGRKKLLYIFKQPFMRPVQTTQEEDGCSCRFPEEEEGGCELA
SLRVKFSRSADAPAYQQGQNQLYNELNLGRREEYDVLDKRRGRDPEMGGKPQRRKNPQEGLY
NELQKDKMAEAYSEIGMKGERRRGKGHDGLYQGLSTATKDTYDALHMQALPPRAS;
(SEQ ID NO: 25)
MLRLLLALNLFPSIQVTGGDVQLVESGGGLVQAGGSLRLSCAASGFPYFSCCMSWHRQAPGK
DRELVSSISSDGSTHYADSVRGRFTISKGNARNTLYLQMNSLKPEDTAVYFCAASPRQLGPY
YAMDYWGQGTSVTVSPTPAPTIASQPLSLRPEACRPAAGGAVHTRGLDFACDPSKPFWVLVV
VGGVLACYSLLVTVAFIIFWVRKRGRKKLLYIFKQPFMRPVQTTQEEDGCSCRFPEEEEGGC
ELASLRVKFSRSADAPAYQQGQNQLYNELNLGRREEYDVLDKRRGRDPEMGGKPQRRKNPQE
GLYNELQKDKMAEAYSEIGMKGERRRGKGHDGLYQGLSTATKDTYDALHMQALPPRAS;
(SEQ ID NO: 26)
MLRLLLALNLFPSIQVTGGQLQLVESGGGLVQPGGSLRLSCAASGFTLDNYAIGWFRQAPGK
EREGVSSISSSGGSTNYADSVKGRFTVSRDNAKHTVYLQMNSLKPEDTAVYYCAGVGDYGRR
AMGQGTSVTVSPTPAPTIASQPLSLRPEACRPAAGGAVHTRGLDFACDPSKPFWVLVVVGGV
LACYSLLVTVAFIIFWVRKRGRKKLLYIFKQPFMRPVQTTQEEDGCSCRFPEEEEGGCELAS
LRVKFSRSADAPAYQQGQNQLYNELNLGRREEYDVLDKRRGRDPEMGGKPQRRKNPQEGLYN
ELQKDKMAEAYSEIGMKGERRRGKGHDGLYQGLSTATKDTYDALHMQALPPRAS;
(SEQ ID NO: 27)
MLRLLLALNLFPSIQVTGGQLQLVESGGGLVQPGGSLRLSCAASGFTLDYYAIGWFRQAPGK
EREGVSYISSSGGSTNYADSVKGRFTISRDNAKNTVYLQMNSLKPEDTGVYSCAAAGGYGNS
SRYWGQGTSVTVSPTPAPTIASQPLSLRPEACRPAAGGAVHTRGLDFACDPSKPFWVLVVVG
GVLACYSLLVTVAFIIFWVRKRGRKKLLYIFKQPFMRPVQTTQEEDGCSCRFPEEEEGGCEL
ASLRVKFSRSADAPAYQQGQNQLYNELNLGRREEYDVLDKRRGRDPEMGGKPQRRKNPQEGL
YNELQKDKMAEAYSEIGMKGERRRGKGHDGLYQGLSTATKDTYDALHMQALPPRAS;
(SEQ ID NO: 28)
MLRLLLALNLFPSIQVTGGEVQLVESGGGSVQAGETLRLSCTASGFTFDDSDMGWYRQAPGD
ECELVSTISSDGSTNYADSVKGRFTISQDNAKNTVYLQMTSLKPEDTAIYSCRTMASRIGCW
GQGTLVTVSPTPAPTIASQPLSLRPEACRPAAGGAVHTRGLDFACDPSKPFWVLVVVGGVLA
CYSLLVTVAFIIFWVRKRGRKKLLYIFKQPFMRPVQTTQEEDGCSCRFPEEEEGGCELASLR
VKFSRSADAPAYQQGQNQLYNELNLGRREEYDVLDKRRGRDPEMGGKPQRRKNPQEGLYNEL
QKDKMAEAYSEIGMKGERRRGKGHDGLYQGLSTATKDTYDALHMQALPPRAS;
and
(SEQ ID NO: 29)
MLRLLLALNLFPSIQVTGGQVQLVESGGGLVQAGGSLRLSCVASGRTFSSYAMGWFRQSPGK
EREFVAAICWSGGNTYYADSVKGRFTISGDNAKNSVYLQMNSLKPEDTAVYICNERTTVLPT
GAMDYWGQGTSVTVSSPTPAPTIASQPLSLRPEACRPAAGGAVHTRGLDFACDPSKPFWVLV
VVGGVLACYSLLVTVAFIIFWVRKRGRKKLLYIFKQPFMRPVQTTQEEDGCSCRFPEEEEGG
CELASLRVKFSRSADAPAYQQGQNQLYNELNLGRREEYDVLDKRRGRDPEMGGKPQRRKNPQ
EGLYNELQKDKMAEAYSEIGMKGERRRGKGHDGLYQGLSTATKDTYDALHMQALPPRAS.

[0015] In another aspect, the disclosure features a VH-heavy chain only (VHH) polypeptide or an antigen binding portion thereof that specifically binds to mesothelin. The binding protein or the antigen binding portion thereof contains an amino acid sequence with at least about 95% identity to one of the following sequences:

(SEQ ID NO: 23)
MLRLLLALNLFPSIQVTGGQVQLVESGGGLVQPGGSLRLSCAASGSMFSINAVAWYRQAPGE
QREPVAAMTSGGSTIYADSVKGRFTISRDNAKNTVYLQMSSLKPEDTAVYYCNGGWSLAMDY
WGQGTSVTVSPTPAPTIASQPLSLRPEACRPAAGGAVHTRGLDFACDPSKPFWVLVVVGGVL
ACYSLLVTVAFIIFWVRKRGRKKLLYIFKQPFMRPVQTTQEEDGCSCRFPEEEEGGCELASL
RVKFSRSADAPAYQQGQNQLYNELNLGRREEYDVLDKRRGRDPEMGGKPQRRKNPQEGLYNE
LQKDKMAEAYSEIGMKGERRRGKGHDGLYQGLSTATKDTYDALHMQALPPRAS;
(SEQ ID NO: 24)
MLRLLLALNLFPSIQVTGGQVQLVESGGGLVQPGGSLRLSCAASGSIFSVNAMGYYRQISTK
QRNLVAAINTGGGSTYYADSVKGRFTISWDNANNTLFLQMNSLKSEDTAVYYCAAEDFGNSK
TYWGQGTLVTVSPTPAPTIASQPLSLRPEACRPAAGGAVHTRGLDFACDPSKPFWVLVVVGG
VLACYSLLVTVAFIIFWVRKRGRKKLLYIFKQPFMRPVQTTQEEDGCSCRFPEEEEGGCELA
SLRVKFSRSADAPAYQQGQNQLYNELNLGRREEYDVLDKRRGRDPEMGGKPQRRKNPQEGLY
NELQKDKMAEAYSEIGMKGERRRGKGHDGLYQGLSTATKDTYDALHMQALPPRAS;
(SEQ ID NO: 25)
MLRLLLALNLFPSIQVTGGDVQLVESGGGLVQAGGSLRLSCAASGFPYFSCCMSWHRQAPGK
DRELVSSISSDGSTHYADSVRGRFTISKGNARNTLYLQMNSLKPEDTAVYFCAASPRQLGPY
YAMDYWGQGTSVTVSPTPAPTIASQPLSLRPEACRPAAGGAVHTRGLDFACDPSKPFWVLVV
VGGVLACYSLLVTVAFIIFWVRKRGRKKLLYIFKQPFMRPVQTTQEEDGCSCRFPEEEEGGC
ELASLRVKFSRSADAPAYQQGQNQLYNELNLGRREEYDVLDKRRGRDPEMGGKPQRRKNPQE
GLYNELQKDKMAEAYSEIGMKGERRRGKGHDGLYQGLSTATKDTYDALHMQALPPRAS;
(SEQ ID NO: 26)
MLRLLLALNLFPSIQVTGGQLQLVESGGGLVQPGGSLRLSCAASGFTLDNYAIGWFRQAPGK
EREGVSSISSSGGSTNYADSVKGRFTVSRDNAKHTVYLQMNSLKPEDTAVYYCAGVGDYGRR
AMGQGTSVTVSPTPAPTIASQPLSLRPEACRPAAGGAVHTRGLDFACDPSKPFWVLVVVGGV
LACYSLLVTVAFIIFWVRKRGRKKLLYIFKQPFMRPVQTTQEEDGCSCRFPEEEEGGCELAS
LRVKFSRSADAPAYQQGQNQLYNELNLGRREEYDVLDKRRGRDPEMGGKPQRRKNPQEGLYN
ELQKDKMAEAYSEIGMKGERRRGKGHDGLYQGLSTATKDTYDALHMQALPPRAS;
(SEQ ID NO: 27)
MLRLLLALNLFPSIQVTGGQLQLVESGGGLVQPGGSLRLSCAASGFTLDYYAIGWFRQAPGK
EREGVSYISSSGGSTNYADSVKGRFTISRDNAKNTVYLQMNSLKPEDTGVYSCAAAGGYGNS
SRYWGQGTSVTVSPTPAPTIASQPLSLRPEACRPAAGGAVHTRGLDFACDPSKPFWVLVVVG
GVLACYSLLVTVAFIIFWVRKRGRKKLLYIFKQPFMRPVQTTQEEDGCSCRFPEEEEGGCEL
ASLRVKFSRSADAPAYQQGQNQLYNELNLGRREEYDVLDKRRGRDPEMGGKPQRRKNPQEGL
YNELQKDKMAEAYSEIGMKGERRRGKGHDGLYQGLSTATKDTYDALHMQALPPRAS;
(SEQ ID NO: 28)
MLRLLLALNLFPSIQVTGGEVQLVESGGGSVQAGETLRLSCTASGFTFDDSDMGWYRQAPGD
ECELVSTISSDGSTNYADSVKGRFTISQDNAKNTVYLQMTSLKPEDTAIYSCRTMASRIGCW
GQGTLVTVSPTPAPTIASQPLSLRPEACRPAAGGAVHTRGLDFACDPSKPFWVLVVVGGVLA
CYSLLVTVAFIIFWVRKRGRKKLLYIFKQPFMRPVQTTQEEDGCSCRFPEEEEGGCELASLR
VKFSRSADAPAYQQGQNQLYNELNLGRREEYDVLDKRRGRDPEMGGKPQRRKNPQEGLYNEL
QKDKMAEAYSEIGMKGERRRGKGHDGLYQGLSTATKDTYDALHMQALPPRAS;
and
(SEQ ID NO: 29)
MLRLLLALNLFPSIQVTGGQVQLVESGGGLVQAGGSLRLSCVASGRTFSSYAMGWFRQSPGK
EREFVAAICWSGGNTYYADSVKGRFTISGDNAKNSVYLQMNSLKPEDTAVYICNERTTVLPT
GAMDYWGQGTSVTVSSPTPAPTIASQPLSLRPEACRPAAGGAVHTRGLDFACDPSKPFWVLV
VVGGVLACYSLLVTVAFIIFWVRKRGRKKLLYIFKQPFMRPVQTTQEEDGCSCRFPEEEEGG
CELASLRVKFSRSADAPAYQQGQNQLYNELNLGRREEYDVLDKRRGRDPEMGGKPQRRKNPQ
EGLYNELQKDKMAEAYSEIGMKGERRRGKGHDGLYQGLSTATKDTYDALHMQALPPRAS.

[0016] In another aspect, the disclosure features a VH-heavy chain only (VHH) polypeptide containing an amino acid sequence having at least 85% sequence identity to a full-length amino acid sequence of any one of Tables 1, 8A to 8G, or 10A to 10M, or a functional fragment thereof, and/or containing a set of Complementarity Determining Regions: CDR1, CDR2, and CDR3, listed in a row of any one of Tables 3A, 8A to 8G, 10A to 10M, or 11. In another aspect, the disclosure features a VH-heavy chain only (VHH) polypeptide containing a full-length amino acid sequence listed in any one of Tables 1, 8A to 8G, or 10A to 10M. In one aspect, the disclosure features a VH-heavy chain only (VHH) polypeptide or an antigen binding portion thereof that specifically binds to mesothelin, where the binding protein or the antigen binding portion thereof contains three Complementarity Determining Regions (CDRs): CDR1, CDR2 and CDR3, which are structurally positioned between four camelid VHH framework (FR) regions (FR1-FR4) as follows: FR1-CDR1-FR2-CDR2-FR3-CDR3-FR4. The three CDRs are selected from: CDR1 containing amino acid sequence SYAMG (SEQ ID NO: 30); CDR2 containing amino acid sequence AICWSGGNTYYADSVKG (SEQ ID NO: 31); and CDR3 containing amino acid sequence RTTVLPTGAMDY (SEQ ID NO: 32); CDR1 containing amino acid sequence INAVA (SEQ ID NO: 33); CDR2 containing amino acid sequence AMTSGGSTIYADSVKG (SEQ ID NO: 34); and CDR3 containing amino acid sequence GWSLAMDY (SEQ ID NO: 35); CDR1 containing amino acid sequence YYAIG (SEQ ID NO: 36); CDR2 containing amino acid sequence YISSSGGSTNYADSVKG (SEQ ID NO: 37); and CDR3 containing amino acid sequence AGGYGNSSRY (SEQ ID NO: 38); CDR1 containing amino acid sequence VNAMG (SEQ ID NO: 39); CDR2 containing amino acid sequence AINTGGGSTYYADSVKG (SEQ ID NO: 40); and CDR3 containing amino acid sequence EDFGNSKTY (SEQ ID NO: 41); CDR1 containing amino acid sequence SCCMS (SEQ ID NO: 42); CDR2 containing amino acid sequence SISSDGSTHYADSVRG (SEQ ID NO: 43); and CDR3 containing amino acid sequence SPRQLGPYYAMDY (SEQ ID NO: 44); CDR1 containing amino acid sequence NYAIG (SEQ ID NO: 45); CDR2 containing amino acid sequence SISSSGGSTNYADSVKG (SEQ ID NO: 46); and CDR3 containing amino acid sequence VGDYGRRA (SEQ ID NO: 47); CDR1 containing amino acid sequence DSDMG (SEQ ID NO: 48); CDR2 containing amino acid sequence TISSDGSTNYADSVKG (SEQ ID NO: 49); and CDR3 containing amino acid sequence MASRIGC (SEQ ID NO: 50); CDR1 containing amino acid sequence YFAIG (SEQ ID NO: 51); CDR2 containing amino acid sequence YISSSGDSTNYADTVKG (SEQ ID NO: 52); and CDR3 containing amino acid sequence AGGYGNSSRY (SEQ ID NO: 38); and CDR1 containing amino acid sequence SYPMG (SEQ ID NO: 53); CDR2 containing amino acid sequence AISWSGGRTFYAASVKG (SEQ ID NO: 54); and CDR3 containing amino acid sequence RTTVLPTGAMDY (SEQ ID NO: 32).

[0017] In another aspect, the disclosure features a polypeptide that specifically binds to mesothelin, where the polypeptide or a mesothelin-binding portion thereof has at least 85% amino acid sequence identity to a sequence selected from one or more of:

(SEQ ID NO: 55)
QVQLVESGGGLVQAGGSLRLSCVASGRTFSSYAMGWFRQSPGKEREFVA
AICWSGGNTYYADSVKGRFTISGDNAKNSVYLQMNSLKPEDTAVYICNE
RTTVLPTGAMDYWGQGTSVTVSS;
(SEQ ID NO: 56)
QVQLVESGGGLVQPGGSLRLSCAASGSMFSINAVAWYRQAPGEQREPVA
AMTSGGSTIYADSVKGRFTISRDNAKNTVYLQMSSLKPEDTAVYYCNGG
WSLAMDYWGQGTSVTVS;
(SEQ ID NO: 57)
QLQLVESGGGLVQPGGSLRLSCAASGFTLDYYAIGWFRQAPGKEREGVS
YISSSGGSTNYADSVKGRFTISRDNAKNTVYLQMNSLKPEDTGVYSCAA
AGGYGNSSRYWGQGTSVTVS;
(SEQ ID NO: 58)
QVQLVESGGGLVQPGGSLRLSCAASGSIFSVNAMGYYRQISTKQRNLVA
AINTGGGSTYYADSVKGRFTISWDNANNTLFLQMNSLKSEDTAVYYCAA
EDFGNSKTYWGQGTLVTVS;
(SEQ ID NO: 59)
DVQLVESGGGLVQAGGSLRLSCAASGFPYFSCCMSWHRQAPGKDRELVS
SISSDGSTHYADSVRGRFTISKGNARNTLYLQMNSLKPEDTAVYFCAAS
PRQLGPYYAMDYWGQGTSVTVS;
(SEQ ID NO: 60)
QLQLVESGGGLVQPGGSLRLSCAASGFTLDNYAIGWFRQAPGKEREGVS
SISSSGGSTNYADSVKGRFTVSRDNAKHTVYLQMNSLKPEDTAVYYCAG
VGDYGRRAMGQGTSVTVS;
(SEQ ID NO: 61)
EVQLVESGGGSVQAGETLRLSCTASGFTFDDSDMGWYRQAPGDECELVS
TISSDGSTNYADSVKGRFTISQDNAKNTVYLQMTSLKPEDTAIYSCRTM
ASRIGCWGQGTLVTVS;
(SEQ ID NO: 62)
QLQLVESGGGLVQPGGSLRLSCAASGFTLDNYAIGWFRQAPGKEREGVS
SISSSGGSTNYADSVKGRFTVSRDNAKQTVYLQMNSLKPEDTAVYYCAG
VGDYGRRAMGQGTSVTVS;
(SEQ ID NO: 63)
QLQLVESGGGLVQPGGSLRLSCAASGFTLDYFAIGWFRQAPGKEREGVS
YISSSGDSTNYADTVKGRFTISRDNAKNTVYLQMNSLKPEDTGVYSCAA
AGGYGNSSRYWGQGTSVTVS;
(SEQ ID NO: 64)
QLQLVESGGGLVQPGGSLRLTCAASGFTLDNYAIGWFRQAPGKEREGVS
SISSSGGSTNYADSVKGRFTVSRDNAKHTVYLQMNSLKPEDTAVYYCAG
VGDYGRRAMGQGTSVTVS
(SEQ ID NO: 65)
QVQLVESGGGLVQAGGSLRLSCAASGRNFSSYPMGWFRQAPGKEREFVA
AISWSGGRTFYAASVKGRFTISRDTAKNSVYLQMNSLKPEDTAVYICNE
RTTVLPTGAMDYWGQGTSVTVS;
and
(SEQ ID NO: 66)
QVQLVESGGGLVQPGGSLRLSCAASGSMFSINAVAWYRQAPGEQREPVA
AMTSGGSTIYADSVKGRFTISRDNAKNTVYLQMNSLKPEDTAVYYCNGG
WSLAMDYWGQGTSVTVS.

[0018] In another aspect, the disclosure features a chimeric antigen receptor polypeptide (CAR) containing the polypeptide of any aspect of the disclosure, or embodiments thereof.

[0019] In another aspect, the disclosure features a polynucleotide encoding the polypeptide or the CAR of any aspect of the disclosure, or embodiments thereof.

[0020] In another aspect, the disclosure features a vector containing the polynucleotide of any aspect of the disclosure, or embodiments thereof.

[0021] In another aspect, the disclosure features a cell containing the polynucleotide or vector of any aspect of the disclosure, or embodiments thereof.

[0022] In another aspect, the disclosure features a pharmaceutical composition containing an effective amount of the polypeptide, or a mesothelin binding fragment thereof, the CAR, the polynucleotide, the vector, or the cell of any aspect of the disclosure, or embodiments thereof, and a pharmaceutically acceptable excipient, carrier, or diluent.

[0023] In another aspect, the disclosure features a method for treating a subject having a neoplasia, the method involves administering to the subject the pharmaceutical composition of any aspect of the disclosure, or embodiments thereof.

[0024] In another aspect, the disclosure features a kit containing the polypeptide, or a mesothelin binding fragment thereof, the CAR, the polynucleotide, the vector, the cell, or the pharmaceutical composition of any aspect of the disclosure, or embodiments thereof, and a container, for use in treating a subject having a neoplasia.

[0025] In another aspect, the disclosure features a method of detecting mesothelin or a fragment thereof in a sample. The method involves contacting the sample with at least one detectably labeled VHH binding protein or an antigen binding fragment thereof that specifically binds to mesothelin or a peptide thereof. The binding protein or the antigen binding fragment thereof contains three Complementarity Determining Regions (CDRs), CDR1, CDR2, and CDR3 structurally positioned between four framework (FR) regions (FR1-FR4) as follows: FR1-CDR1-FR2-CDR2-FR3-CDR3-FR4. The three CDRs are selected from: CDR1 containing amino acid sequence SYAMG (SEQ ID NO: 30); CDR2 containing amino acid sequence AICWSGGNTYYADSVKG (SEQ ID NO: 31); and CDR3 containing amino acid sequence RTTVLPTGAMDY (SEQ ID NO: 32); CDR1 containing amino acid sequence INAVA (SEQ ID NO: 33); CDR2 containing amino acid sequence AMTSGGSTIYADSVKG (SEQ ID NO: 34); and CDR3 containing amino acid sequence GWSLAMDY (SEQ ID NO: 35); CDR1 containing amino acid sequence YYAIG (SEQ ID NO: 36); CDR2 containing amino acid sequence YISSSGGSTNYADSVKG (SEQ ID NO: 37); and CDR3 containing amino acid sequence AGGYGNSSRY (SEQ ID NO: 38); CDR1 containing amino acid sequence VNAMG (SEQ ID NO: 39); CDR2 containing amino acid sequence AINTGGGSTYYADSVKG (SEQ ID NO: 40); and CDR3 containing amino acid sequence EDFGNSKTY (SEQ ID NO: 41); CDR1 containing amino acid sequence SCCMS (SEQ ID NO: 42); CDR2 containing amino acid sequence SISSDGSTHYADSVRG (SEQ ID NO: 43); and CDR3 containing amino acid sequence SPRQLGPYYAMDY (SEQ ID NO: 44); CDR1 containing amino acid sequence NYAIG (SEQ ID NO: 45); CDR2 containing amino acid sequence SISSSGGSTNYADSVKG (SEQ ID NO: 46); and CDR3 containing amino acid sequence VGDYGRRA (SEQ ID NO: 47); CDR1 containing amino acid sequence DSDMG (SEQ ID NO: 48); CDR2 containing amino acid sequence TISSDGSTNYADSVKG (SEQ ID NO: 49); and CDR3 containing amino acid sequence MASRIGC (SEQ ID NO: 50); CDR1 containing amino acid sequence YFAIG (SEQ ID NO: 51); CDR2 containing amino acid sequence YISSSGDSTNYADTVKG (SEQ ID NO: 52); and CDR3 containing amino acid sequence AGGYGNSSRY (SEQ ID NO: 38); and CDR1 containing amino acid sequence SYPMG (SEQ ID NO: 53); CDR2 containing amino acid sequence AISWSGGRTFYAASVKG (SEQ ID NO: 54); and CDR3 containing amino acid sequence RTTVLPTGAMDY (SEQ ID NO: 32). Further, i) FR1 contains the following amino acid sequence: X₁X₂QLVESGGGX₃VQX₄GX₅X₆LRLX₇CX₈ASGX₉X₁₀X₁₁X₁₂ (SEQ ID NO: 67), where X₁ is E, D, or Q, X₂ is V or L, X₃ is L or S, X₄ is A or P, X₅ is E or G, X₆ is S or T, X₇ is S or T, X₈ is A, T, or V, X₉ is F, R, or S, X₁₀ is I, M, P, or T, X₁₁ is F, L, or Y, and X₁₂ is D, F, or S, and X₁₅ is D, F, N, or S; ii) FR2 contains the following amino acid sequence: X₁₃X₁₄RQX₁₅X₁₆X₁₇X₁₈X₁₉X₂₀X₂₁X₂₂VX₂₃, where X₁₃ is W or Y, X₁₄ is F, H, or Y, X₁₅ is A, I, or X, X₁₆ is P or S, X₁₇ is G or T, X₁₈ is D, K, or E, X₁₉ is D, E, or Q, X₂₀ is C or R, X₂₁ is E or N, X₂₂ is F, G, L, or P, and X₂₃ is S or A, and X₂₆ is S or A; iii) FR3 contains the following amino acid sequence:
[0026] RFTX₂₄SX₂₅X₂₆X₂₇AX₂₈X₂₉X₃₀X₃₁X₃₂LQMX₃₃SLKX₃₄EDTX₃₅X₃₆YX₃₇CX₃₈X₃₉ (SEQ ID NO: 68), where X₂₄ is I or V, X₂₅ is G, K, R, Q, or W, X₂₆ is D or G, X₂₇ is N or T, X₂₈ is K, N, or R, X₂₉ is N, H, or Q, X₃₀ is T or S, X₃₁ is V or L, X₃₂ is F or Y, X₃₃ is N, S, or T, X₃₄ is P or S, X₃₅ is A or G, X₃₆ is I or V, X₃₇ is F, I, S, or Y, X₃₈ is A, N, or R, and X₃₉ is A, E, G, or T, or Y; and FR4 contains the following amino acid sequence:
[0027] X₄₀GQGTX₄₁VTVX₄₂X₄₃ (SEQ ID NO: 22), where X₄₀ is M or W, X₄₁ is L or S, X₄₂ is null or S, and X₄₃ is null or S. The method further involves measuring the level of binding of the binding protein to mesothelin in the sample relative to a control to detect or identify the presence of mesothelin in the sample.

[0028] In any aspect of the disclosure, or embodiments thereof, i) FR1 contains the following amino acid sequence: X₁X₂QLVESGGGX₃VQX₄GX₅X₆LRLX₇CX₈ASGX₉X₁₀X₁₁X₁₂ (SEQ ID NO: 67), where X₁ is E, D, or Q, X₂ is V or L, X₃ is L or S, X₄ is A or P, X₅ is E or G, X₆ is S or T, X₇ is S or T, X₈ is A, T, or V, X₉ is F, R, or S, X₁₀ is I, M, P, or T, X₁₁ is F, L, or Y, and X₁₂ is D, F, or S, and X₁₅ is D, F, N, or S; ii) FR2 contains the following amino acid sequence: X₁₃X₁₄RQX₁₅X₁₆X₁₇X₁₈X₁₉X₂₀X₂₁X₂₂VX₂₃, where X₁₃ is W or Y, X₁₄ is F, H, or Y, X₁₅ is A, I, or X, X₁₆ is P or S, X₁₇ is G or T, X₁₈ is D, K, or E, X₁₉ is D, E, or Q, X₂₀ is C or R, X₂₁ is E or N, X₂₂ is F, G, L, or P, and X₂₃ is S or A, and X₂₆ is S or A; iii) FR3 contains the following amino acid sequence:
[0029] RFTX₂₄SX₂₅X₂₆X₂₇AX₂₈X₂₉X₃₀X₃₁X₃₂LQMX₃₃SLKX₃₄EDTX₃₅X₃₆YX₃₇CX₃₈X₃₉ (SEQ ID NO: 68), where X₂₄ is I or V, X₂₅ is G, K, R, Q, or W, X₂₆ is D or G, X₂₇ is N or T, X₂₈ is K, N, or R, X₂₉ is N, H, or Q, X₃₀ is T or S, X₃₁ is V or L, X₃₂ is F or Y, X₃₃ is N, S, or T, X₃₄ is P or S, X₃₅ is A or G, X₃₆ is I or V, X₃₇ is F, I, S, or Y, X₃₈ is A, N, or R, and X₃₉ is A, E, G, or T, or Y; and FR4 contains the following amino acid sequence:
[0030] X₄₀GQGTX₄₁VTVX₄₂X₄₃ (SEQ ID NO: 22), where X₄₀ is M or W, X₄₁ is L or S, X₄₂ is null or S, and X₄₃ is null or S.

[0031] In any aspect of the disclosure, or embodiments thereof, the CAR contains in order from N-terminus to C-terminus a CD28 signal peptide, the mesothelin-binding polypeptide (e.g., a VHH polypeptide) of any aspect of the disclosure, or embodiments thereof, a CD8 hinge domain, a CD28 transmembrane domain, a CD28 cytoplasmic domain, and a CD3ζ domain.

[0032] In any aspect of the disclosure, or embodiments thereof, the polynucleotide contains a sequence that has at least 85% amino acid sequence identity to a sequence selected from one or more of:

(SEQ ID NO: 69)
CAAGTTCAGCTTGTGGAGTCAGGCGGTGGACTCGTTCAAGCCGGAGGCTCACTGCGGTTGTC
TTGTGTCGCATCTGGTCGAACCTTCTCAAGTTATGCTATGGGGTGGTTCCGCCAGTCTCCTG
GTAAAGAGCGGGAATTTGTCGCAGCAATTTGTTGGTCTGGTGGTAACACTTACTATGCTGAT
TCAGTAAAAGGTCGATTCACCATATCAGGGGATAATGCAAAAAATTCTGTCTATCTCCAAAT
GAACTCTCTGAAGCCTGAAGATACTGCTGTGTATATCTGTAATGAGAGGACTACGGTACTAC
CTACGGGTGCTATGGACTACTGGGGTCAAGGGACCTCAGTCACCGTCTCCTCG;
(SEQ ID NO: 70)
CAAGTTCAGCTTGTCGAGAGTGGTGGAGGATTGGTGCAGCCAGGCGGATCTCTCAGACTTTC
CTGCGCCGCCAGTGGTTCTATGTTTTCCATAAATGCAGTGGCCTGGTACAGGCAAGCACCAG
GCGAGCAAAGGGAACCGGTAGCCGCAATGACCTCTGGAGGTAGTACAATTTACGCTGATAGC
GTCAAGGGACGATTCACAATATCACGAGACAATGCCAAGAACACTGTCTACCTTCAAATGAG
CAGTTTGAAACCTGAGGATACAGCAGTATACTACTGCAATGGAGGATGGTCACTGGCTATGG
ACTACTGGGGTCAAGGAACCTCAGTCACCGTCTCC;
(SEQ ID NO: 71)
CAGCTTCAACTGGTAGAGAGTGGTGGAGGACTTGTTCAGCCTGGAGGGTCCCTTAGACTTAG
TTGCGCTGCCAGTGGGTTCACCCTGGACTACTACGCCATTGGCTGGTTTCGACAGGCCCCAG
GGAAAGAGCGAGAGGGGGTCTCTTACATCAGTAGTTCCGGTGGTTCCACTAACTACGCTGAT
AGTGTGAAGGGGAGGTTTACTATTTCTCGGGATAATGCAAAAAATACCGTGTACCTGCAAAT
GAATAGCCTCAAACCAGAAGACACAGGCGTTTATTCTTGCGCAGCAGCTGGGGGCTATGGTA
ACTCCTCTCGCTACTGGGGTCAAGGAACCTCAGTCACCGTCTCC;
(SEQ ID NO: 72)
CAGGTTCAGCTGGTGGAGTCCGGCGGAGGTCTTGTTCAGCCCGGAGGTTCCCTGCGCCTCTC
TTGTGCAGCTTCTGGTTCCATTTTCTCAGTCAATGCAATGGGCTACTACAGACAAATTTCCA
CAAAGCAGCGCAACTTGGTCGCCGCAATAAATACTGGTGGTGGCTCGACTTATTACGCCGAT
AGTGTCAAAGGACGATTTACTATAAGTTGGGACAACGCAAACAATACTTTGTTCCTCCAAAT
GAATAGCCTCAAATCAGAAGACACTGCCGTCTACTACTGTGCAGCAGAGGACTTTGGTAACT
CGAAAACTTACTGGGGCCAAGGGACTCTGGTCACTGTCTCT;
(SEQ ID NO: 73)
GACGTACAACTTGTGGAATCAGGTGGGGGTCTCGTTCAAGCTGGTGGGTCACTGCGGCTTTC
TTGCGCTGCAAGTGGGTTCCCTTATTTTTCCTGCTGTATGAGCTGGCATCGCCAAGCTCCTG
GAAAAGATCGGGAACTGGTCTCCAGTATTTCATCTGACGGGTCAACACATTACGCTGATAGC
GTCAGGGGGAGGTTTACTATTTCTAAAGGAAATGCAAGAAACACACTCTACCTCCAGATGAA
CAGTCTGAAGCCCGAAGACACCGCCGTGTATTTCTGTGCAGCTTCCCCTAGACAGCTCGGGC
CTTACTATGCTATGGACTACTGGGGTCAAGGAACCTCAGTCACCGTCTCC;
(SEQ ID NO: 74)
CAGCTTCAACTGGTAGAGAGTGGTGGAGGACTTGTTCAGCCTGGAGGGTCCCTTAGACTTAG
TTGCGCTGCCAGTGGGTTCACCCTGGACAACTACGCCATTGGCTGGTTTCGACAGGCCCCAG
GGAAAGAGCGAGAGGGGGTCTCTAGCATCAGTAGTTCCGGTGGTTCCACCAACTATGCTGAT
AGTGTGAAGGGGAGGTTTACTGTTTCTCGGGATAATGCAAAACATACCGTGTACCTGCAAAT
GAATAGCCTCAAACCAGAAGACACAGCCGTCTATTATTGCGCAGGAGTTGGGGACTACGGTA
GAAGGGCGATGGGTCAAGGCACCTCAGTCACCGTCTCC;
(SEQ ID NO: 75)
GAAGTTCAGCTTGTTGAATCAGGCGGCGGAAGTGTCCAAGCTGGCGAAACCCTTCGGCTCTC
CTGCACCGCATCCGGCTTCACATTCGATGATTCAGATATGGGCTGGTACAGGCAGGCTCCTG
GTGACGAATGTGAGCTGGTATCCACAATCTCCAGCGATGGCAGCACAAATTATGCTGACTCT
GTTAAAGGGCGATTTACCATCTCTCAAGATAACGCAAAGAACACCGTGTATCTGCAGATGAC
CTCATTGAAGCCAGAGGATACTGCCATATATTCATGCAGAACAATGGCCTCGAGGATTGGTT
GCTGGGGCCAAGGGACTCTGGTCACTGTCTCT;
(SEQ ID NO: 76)
CAGCTTCAACTGGTAGAGAGTGGTGGAGGACTTGTTCAGCCTGGAGGGTCCCTTAGACTTAG
TTGCGCTGCCAGTGGATTCACCCTGGACAACTACGCCATTGGCTGGTTTCGACAGGCCCCAG
GGAAAGAGCGAGAGGGGGTCTCTAGTATCAGTAGTTCCGGTGGTTCCACCAACTATGCCGAT
AGTGTGAAGGGGAGGTTTACTGTTTCTCGGGATAATGCAAAACAAACCGTGTACCTGCAAAT
GAATAGCCTCAAACCAGAAGACACAGCCGTCTATTATTGCGCAGGAGTTGGGGACTACGGTA
GAAGGGCGATGGGTCAAGGCACCTCAGTCACCGTCTCC;
(SEQ ID NO: 77)
CAGCTTCAACTGGTAGAGAGTGGTGGAGGACTTGTTCAGCCTGGAGGGTCCCTTAGACTTAG
TTGCGCTGCCAGTGGGTTCACCCTGGACTACTTCGCCATTGGCTGGTTTCGACAGGCCCCAG
GGAAAGAGCGAGAGGGGGTCTCTTACATCAGTAGTTCCGGTGATTCCACTAACTACGCTGAT
ACTGTGAAGGGGAGGTTTACTATTTCTCGGGATAATGCAAAAAATACCGTGTACCTGCAAAT
GAATAGCCTCAAACCAGAAGACACAGGCGTTTATTCTTGCGCAGCAGCTGGGGGCTATGGTA
ACTCCTCTCGCTACTGGGGTCAAGGAACCTCAGTCACCGTCTCC;
(SEQ ID NO: 78)
CAGCTTCAACTGGTAGAGAGTGGTGGAGGACTTGTTCAGCCTGGAGGGTCCCTTAGACTTAC
TTGCGCTGCCAGTGGGTTCACCCTGGACAACTACGCCATTGGCTGGTTTCGACAGGCCCCAG
GGAAAGAGCGAGAGGGGGTCTCTAGCATCAGTAGTTCCGGTGGTTCCACCAACTATGCTGAT
AGTGTGAAGGGGAGGTTTACTGTTTCTCGGGATAATGCAAAACATACCGTGTACCTGCAAAT
GAATAGCCTCAAACCAGAAGACACAGCCGTCTATTATTGCGCAGGAGTTGGGGACTACGGTA
GAAGGGCGATGGGTCAAGGCACCTCAGTCACCGTCTCC;
(SEQ ID NO: 75)
GAAGTTCAGCTTGTTGAATCAGGCGGCGGAAGTGTCCAAGCTGGCGAAACCCTTCGGCTCTC
CTGCACCGCATCCGGCTTCACATTCGATGATTCAGATATGGGCTGGTACAGGCAGGCTCCTG
GTGACGAATGTGAGCTGGTATCCACAATCTCCAGCGATGGCAGCACAAATTATGCTGACTCT
GTTAAAGGGCGATTTACCATCTCTCAAGATAACGCAAAGAACACCGTGTATCTGCAGATGAC
CTCATTGAAGCCAGAGGATACTGCCATATATTCATGCAGAACAATGGCCTCGAGGATTGGTT
GCTGGGGCCAAGGGACTCTGGTCACTGTCTCT;
and
(SEQ ID NO: 79)
CAAGTCCAGCTCGTCGAGAGTGGTGGAGGATTGGTGCAGCCAGGCGGATCTCTCAGACTTTC
CTGCGCCGCCAGTGGTTCTATGTTTTCCATAAATGCAGTGGCCTGGTACAGGCAAGCACCAG
GCGAGCAAAGGGAACCGGTAGCCGCAATGACCTCTGGAGGTAGTACAATTTACGCTGATAGC
GTCAAGGGACGATTCACAATATCACGAGACAATGCCAAGAACACTGTCTACCTTCAAATGAA
CAGTTTGAAACCTGAGGATACAGCAGTATACTACTGCAATGGAGGATGGTCACTGGCTATGG
ACTACTGGGGTCAAGGAACCTCAGTCACCGTCTCC.

[0033] In any aspect of the disclosure, or embodiments thereof, the vector is an expression vector.

[0034] In any aspect of the disclosure, or embodiments thereof, the cell in an immune cell. In embodiments, the immune cell is a T cell. In embodiments, the cell is in vitro, ex vivo, or in vivo.

[0035] In any aspect of the disclosure, or embodiments thereof, the subject is a mammal. In embodiments, the mammal is a human.

[0036] In any aspect of the disclosure, or embodiments thereof, the sample is selected from biopsy, blood, peripheral blood, serum, plasma, cerebrospinal fluid, urine, saliva, sputum, tears, stool, or synovial fluid.

[0037] Compositions and articles of the disclosure were isolated or otherwise manufactured in connection with the examples provided below. Other features and advantages of the various aspects and embodiments of the disclosure will be apparent from the detailed description, and from the claims.

[0038] In any aspect of the disclosure, or embodiments thereof, i) FR1 contains the following amino acid sequence: X₁X₂QLVESGGGX₃VQX₄GX₅X₆LRLX₇CX₈AS (SEQ ID NO: 20), where X₁ is E, D, or Q; X₂ is V or L; X₃ is L or S; X₄ is A or P; X₅ is E or G; X₆ is S or T; X₇ is S or T; and X₈ is A, T, or V; ii) FR2 contains the following amino acid sequence:
[0039] XₐX_{b}X₁₃X₁₄RQX₁₅X₁₆X₁₇X₁₈X₁₉X₂₀X₂₁X₂₂VX₂₃X_{c}, where Xₐ is I, M, or V; X_{b} is A, G, or S;
[0040] X₁₃ is W or Y; X₁₄ is F, H, or Y; X₁₅ is A, I, or X; X₁₆ is P or S; X₁₇ is G or T; X₁₈ is D, K, or E; X₁₉ is D, E, or Q; X₂₀ is C or R; X₂₁ is E or N; X₂₂ is F, G, L, or P; X₂₃ is S or A; and X_{c} is A, S, T, or Y; iii) FR3 contains the following amino acid sequence:
[0041] X_{d}YAXₑX_{f}VX_{g}GRFTX₂₄SX₂₅X₂₆X₂₇AX₂₈X₂₉X₃₀X₃₁X₃₂LQMX₃₃SLKX₃₄EDTX₃₅X₃₆YX₃₇C (SEQ ID NO: 21), where X_{d} is F, H, I, N, or Y; Xₑ is A or D; X_{f} is S or T; X_{g} is K or R; X₂₄ is I or V; X₂₅ is G, K, R, Q, or W; X₂₆ is D or G; X₂₇ is N or T; X₂₈ is K, N, or R; X₂₉ is N, H, or Q; X₃₀ is T or S; X₃₁ is V or L; X₃₂ is F or Y; X₃₃ is N, S, or T; X₃₄ is P or S; X₃₅ is A or G; X₃₆ is I or V; and X₃₇ is F, I, S, or Y; and iv) FR4 contains the following amino acid sequence: X₄₀GQGTX₄₁VTVX₄₂X₄₃ (SEQ ID NO: 22), where X₄₀ is M or W; X₄₁ is L or S;
[0042] X₄₂ is null or S; and X₄₃ is null or S.

[0043] In any aspect of the disclosure, or embodiments thereof, the polypeptide binds a mesothelin antigen with a K_{d} of less than 12 nM.

[0044] In any aspect of the disclosure, or embodiments thereof, the polypeptide contains an amino acid sequence with at least about 85% identity to one of the following sequences:

(SEQ ID NO: 23)
MLRLLLALNLFPSIQVTGGQVQLVESGGGLVQPGGSLRLSCAASGSMFSINAVAWYRQAPGE
QREPVAAMTSGGSTIYADSVKGRFTISRDNAKNTVYLQMSSLKPEDTAVYYCNGGWSLAMDY
WGQGTSVTVSPTPAPTIASQPLSLRPEACRPAAGGAVHTRGLDFACDPSKPFWVLVVVGGVL
ACYSLLVTVAFIIFWVRKRGRKKLLYIFKQPFMRPVQTTQEEDGCSCRFPEEEEGGCELASL
RVKFSRSADAPAYQQGQNQLYNELNLGRREEYDVLDKRRGRDPEMGGKPQRRKNPQEGLYNE
LQKDKMAEAYSEIGMKGERRRGKGHDGLYQGLSTATKDTYDALHMQALPPRAS;
(SEQ ID NO: 24)
MLRLLLALNLFPSIQVTGGQVQLVESGGGLVQPGGSLRLSCAASGSIFSVNAMGYYRQISTK
QRNLVAAINTGGGSTYYADSVKGRFTISWDNANNTLFLQMNSLKSEDTAVYYCAAEDFGNSK
TYWGQGTLVTVSPTPAPTIASQPLSLRPEACRPAAGGAVHTRGLDFACDPSKPFWVLVVVGG
VLACYSLLVTVAFIIFWVRKRGRKKLLYIFKQPFMRPVQTTQEEDGCSCRFPEEEEGGCELA
SLRVKFSRSADAPAYQQGQNQLYNELNLGRREEYDVLDKRRGRDPEMGGKPQRRKNPQEGLY
NELQKDKMAEAYSEIGMKGERRRGKGHDGLYQGLSTATKDTYDALHMQALPPRAS;
(SEQ ID NO: 25)
MLRLLLALNLFPSIQVTGGDVQLVESGGGLVQAGGSLRLSCAASGFPYFSCCMSWHRQAPGK
DRELVSSISSDGSTHYADSVRGRFTISKGNARNTLYLQMNSLKPEDTAVYFCAASPRQLGPY
YAMDYWGQGTSVTVSPTPAPTIASQPLSLRPEACRPAAGGAVHTRGLDFACDPSKPFWVLVV
VGGVLACYSLLVTVAFIIFWVRKRGRKKLLYIFKQPFMRPVQTTQEEDGCSCRFPEEEEGGC
ELASLRVKFSRSADAPAYQQGQNQLYNELNLGRREEYDVLDKRRGRDPEMGGKPQRRKNPQE
GLYNELQKDKMAEAYSEIGMKGERRRGKGHDGLYQGLSTATKDTYDALHMQALPPRAS;
(SEQ ID NO: 26)
MLRLLLALNLFPSIQVTGGQLQLVESGGGLVQPGGSLRLSCAASGFTLDNYAIGWFRQAPGK
EREGVSSISSSGGSTNYADSVKGRFTVSRDNAKHTVYLQMNSLKPEDTAVYYCAGVGDYGRR
AMGQGTSVTVSPTPAPTIASQPLSLRPEACRPAAGGAVHTRGLDFACDPSKPFWVLVVVGGV
LACYSLLVTVAFIIFWVRKRGRKKLLYIFKQPFMRPVQTTQEEDGCSCRFPEEEEGGCELAS
LRVKFSRSADAPAYQQGQNQLYNELNLGRREEYDVLDKRRGRDPEMGGKPQRRKNPQEGLYN
ELQKDKMAEAYSEIGMKGERRRGKGHDGLYQGLSTATKDTYDALHMQALPPRAS;
(SEQ ID NO: 27)
MLRLLLALNLFPSIQVTGGQLQLVESGGGLVQPGGSLRLSCAASGFTLDYYAIGWFRQAPGK
EREGVSYISSSGGSTNYADSVKGRFTISRDNAKNTVYLQMNSLKPEDTGVYSCAAAGGYGNS
SRYWGQGTSVTVSPTPAPTIASQPLSLRPEACRPAAGGAVHTRGLDFACDPSKPFWVLVVVG
GVLACYSLLVTVAFIIFWVRKRGRKKLLYIFKQPFMRPVQTTQEEDGCSCRFPEEEEGGCEL
ASLRVKFSRSADAPAYQQGQNQLYNELNLGRREEYDVLDKRRGRDPEMGGKPQRRKNPQEGL
YNELQKDKMAEAYSEIGMKGERRRGKGHDGLYQGLSTATKDTYDALHMQALPPRAS;
(SEQ ID NO: 28)
MLRLLLALNLFPSIQVTGGEVQLVESGGGSVQAGETLRLSCTASGFTFDDSDMGWYRQAPGD
ECELVSTISSDGSTNYADSVKGRFTISQDNAKNTVYLQMTSLKPEDTAIYSCRTMASRIGCW
GQGTLVTVSPTPAPTIASQPLSLRPEACRPAAGGAVHTRGLDFACDPSKPFWVLVVVGGVLA
CYSLLVTVAFIIFWVRKRGRKKLLYIFKQPFMRPVQTTQEEDGCSCRFPEEEEGGCELASLR
VKFSRSADAPAYQQGQNQLYNELNLGRREEYDVLDKRRGRDPEMGGKPQRRKNPQEGLYNEL
QKDKMAEAYSEIGMKGERRRGKGHDGLYQGLSTATKDTYDALHMQALPPRAS;
and
(SEQ ID NO: 29)
MLRLLLALNLFPSIQVTGGQVQLVESGGGLVQAGGSLRLSCVASGRTFSSYAMGWFRQSPGK
EREFVAAICWSGGNTYYADSVKGRFTISGDNAKNSVYLQMNSLKPEDTAVYICNERTTVLPT
GAMDYWGQGTSVTVSSPTPAPTIASQPLSLRPEACRPAAGGAVHTRGLDFACDPSKPFWVLV
VVGGVLACYSLLVTVAFIIFWVRKRGRKKLLYIFKQPFMRPVQTTQEEDGCSCRFPEEEEGG
CELASLRVKFSRSADAPAYQQGQNQLYNELNLGRREEYDVLDKRRGRDPEMGGKPQRRKNPQ
EGLYNELQKDKMAEAYSEIGMKGERRRGKGHDGLYQGLSTATKDTYDALHMQALPPRAS.

[0045] In any aspect of the disclosure, or embodiments thereof, polynucleotide contains a sequence that has at least 85% identity to a sequence selected from one or more of:

(SEQ ID NO: 80)
ATGCTCAGGCTGCTCTTGGCTCTCAACTTATTCCCTTCAATTCAAGTAACAGGAGGGCAAGT
TCAGCTTGTCGAGAGTGGTGGAGGATTGGTGCAGCCAGGCGGATCTCTCAGACTTTCCTGCG
CCGCCAGTGGTTCTATGTTTTCCATAAATGCAGTGGCCTGGTACAGGCAAGCACCAGGCGAG
CAAAGGGAACCGGTAGCCGCAATGACCTCTGGAGGTAGTACAATTTACGCTGATAGCGTCAA
GGGACGATTCACAATATCACGAGACAATGCCAAGAACACTGTCTACCTTCAAATGAGCAGTT
TGAAACCTGAGGATACAGCAGTATACTACTGCAATGGAGGATGGTCACTGGCTATGGACTAC
TGGGGTCAAGGAACCTCAGTCACCGTCTCCCCGACGCCAGCGCCAACTATTGCGAGTCAGCC
TCTCAGTCTGCGACCTGAGGCTTGTCGACCAGCAGCCGGAGGCGCAGTGCACACGAGGGGGC
TGGACTTCGCCTGTGATCCTTCTAAGCCCTTTTGGGTGCTGGTGGTGGTTGGTGGAGTCCTG
GCTTGCTATAGCTTGCTAGTAACAGTGGCCTTTATTATTTTCTGGGTGAGGAAACGGGGCAG
AAAGAAACTCCTGTATATATTCAAACAACCATTTATGAGACCAGTACAAACTACTCAAGAGG
AAGATGGCTGTAGCTGCCGATTTCCAGAAGAAGAAGAAGGAGGATGTGAACTGGCTAGCCTG
AGAGTGAAGTTCAGCAGGAGCGCAGACGCCCCCGCGTACCAGCAGGGCCAGAACCAGCTCTA
TAACGAGCTCAATCTAGGACGAAGAGAGGAGTACGATGTTTTGGACAAGAGACGTGGCCGGG
ACCCTGAGATGGGGGGAAAGCCGCAGAGAAGGAAGAACCCTCAGGAAGGCCTGTACAATGAA
CTGCAGAAAGATAAGATGGCGGAGGCCTACAGTGAGATTGGGATGAAAGGCGAGCGCCGGAG
GGGCAAGGGGCACGATGGCCTTTACCAGGGTCTCAGTACAGCCACCAAGGACACCTACGACG
CCCTTCACATGCAGGCCCTGCCCCCTCGCGCTAGC;
(SEQ ID NO: 81)
ATGCTCAGGCTGCTCTTGGCTCTCAACTTATTCCCTTCAATTCAAGTAACAGGAGGGCAGGT
TCAGCTGGTGGAGTCCGGCGGAGGTCTTGTTCAGCCCGGAGGTTCCCTGCGCCTCTCTTGTG
CAGCTTCTGGTTCCATTTTCTCAGTCAATGCAATGGGCTACTACAGACAAATTTCCACAAAG
CAGCGCAACTTGGTCGCCGCAATAAATACTGGTGGTGGCTCGACTTATTACGCCGATAGTGT
CAAAGGACGATTTACTATAAGTTGGGACAACGCAAACAATACTTTGTTCCTCCAAATGAATA
GCCTCAAATCAGAAGACACTGCCGTCTACTACTGTGCAGCAGAGGACTTTGGTAACTCGAAA
ACTTACTGGGGCCAAGGGACTCTGGTCACTGTCTCTCCGACGCCAGCGCCAACTATTGCGAG
TCAGCCTCTCAGTCTGCGACCTGAGGCTTGTCGACCAGCAGCCGGAGGCGCAGTGCACACGA
GGGGGCTGGACTTCGCCTGTGATCCTTCTAAGCCCTTTTGGGTGCTGGTGGTGGTTGGTGGA
GTCCTGGCTTGCTATAGCTTGCTAGTAACAGTGGCCTTTATTATTTTCTGGGTGAGGAAACG
GGGCAGAAAGAAACTCCTGTATATATTCAAACAACCATTTATGAGACCAGTACAAACTACTC
AAGAGGAAGATGGCTGTAGCTGCCGATTTCCAGAAGAAGAAGAAGGAGGATGTGAACTGGCT
AGCCTGAGAGTGAAGTTCAGCAGGAGCGCAGACGCCCCCGCGTACCAGCAGGGCCAGAACCA
GCTCTATAACGAGCTCAATCTAGGACGAAGAGAGGAGTACGATGTTTTGGACAAGAGACGTG
GCCGGGACCCTGAGATGGGGGGAAAGCCGCAGAGAAGGAAGAACCCTCAGGAAGGCCTGTAC
AATGAACTGCAGAAAGATAAGATGGCGGAGGCCTACAGTGAGATTGGGATGAAAGGCGAGCG
CCGGAGGGGCAAGGGGCACGATGGCCTTTACCAGGGTCTCAGTACAGCCACCAAGGACACCT
ACGACGCCCTTCACATGCAGGCCCTGCCCCCTCGCGCTAGC;
(SEQ ID NO: 82)
ATGCTCAGGCTGCTCTTGGCTCTCAACTTATTCCCTTCAATTCAAGTAACAGGAGGGGACGT
ACAACTTGTGGAATCAGGTGGGGGTCTCGTTCAAGCTGGTGGGTCACTGCGGCTTTCTTGCG
CTGCAAGTGGGTTCCCTTATTTTTCCTGCTGTATGAGCTGGCATCGCCAAGCTCCTGGAAAA
GATCGGGAACTGGTCTCCAGTATTTCATCTGACGGGTCAACACATTACGCTGATAGCGTCAG
GGGGAGGTTTACTATTTCTAAAGGAAATGCAAGAAACACACTCTACCTCCAGATGAACAGTC
TGAAGCCCGAAGACACCGCCGTGTATTTCTGTGCAGCTTCCCCTAGACAGCTCGGGCCTTAC
TATGCTATGGACTACTGGGGTCAAGGAACCTCAGTCACCGTCTCCCCGACGCCAGCGCCAAC
TATTGCGAGTCAGCCTCTCAGTCTGCGACCTGAGGCTTGTCGACCAGCAGCCGGAGGCGCAG
TGCACACGAGGGGGCTGGACTTCGCCTGTGATCCTTCTAAGCCCTTTTGGGTGCTGGTGGTG
GTTGGTGGAGTCCTGGCTTGCTATAGCTTGCTAGTAACAGTGGCCTTTATTATTTTCTGGGT
GAGGAAACGGGGCAGAAAGAAACTCCTGTATATATTCAAACAACCATTTATGAGACCAGTAC
AAACTACTCAAGAGGAAGATGGCTGTAGCTGCCGATTTCCAGAAGAAGAAGAAGGAGGATGT
GAACTGGCTAGCCTGAGAGTGAAGTTCAGCAGGAGCGCAGACGCCCCCGCGTACCAGCAGGG
CCAGAACCAGCTCTATAACGAGCTCAATCTAGGACGAAGAGAGGAGTACGATGTTTTGGACA
AGAGACGTGGCCGGGACCCTGAGATGGGGGGAAAGCCGCAGAGAAGGAAGAACCCTCAGGAA
GGCCTGTACAATGAACTGCAGAAAGATAAGATGGCGGAGGCCTACAGTGAGATTGGGATGAA
AGGCGAGCGCCGGAGGGGCAAGGGGCACGATGGCCTTTACCAGGGTCTCAGTACAGCCACCA
AGGACACCTACGACGCCCTTCACATGCAGGCCCTGCCCCCTCGCGCTAGC;
(SEQ ID NO: 83)
ATGCTCAGGCTGCTCTTGGCTCTCAACTTATTCCCTTCAATTCAAGTAACAGGAGGGCAGCT
TCAACTGGTAGAGAGTGGTGGAGGACTTGTTCAGCCTGGAGGGTCCCTTAGACTTAGTTGCG
CTGCCAGTGGGTTCACCCTGGACAACTACGCCATTGGCTGGTTTCGACAGGCCCCAGGGAAA
GAGCGAGAGGGGGTCTCTAGCATCAGTAGTTCCGGTGGTTCCACCAACTATGCTGATAGTGT
GAAGGGGAGGTTTACTGTTTCTCGGGATAATGCAAAACATACCGTGTACCTGCAAATGAATA
GCCTCAAACCAGAAGACACAGCCGTCTATTATTGCGCAGGAGTTGGGGACTACGGTAGAAGG
GCGATGGGTCAAGGCACCTCAGTCACCGTCTCCCCGACGCCAGCGCCAACTATTGCGAGTCA
GCCTCTCAGTCTGCGACCTGAGGCTTGTCGACCAGCAGCCGGAGGCGCAGTGCACACGAGGG
GGCTGGACTTCGCCTGTGATCCTTCTAAGCCCTTTTGGGTGCTGGTGGTGGTTGGTGGAGTC
CTGGCTTGCTATAGCTTGCTAGTAACAGTGGCCTTTATTATTTTCTGGGTGAGGAAACGGGG
CAGAAAGAAACTCCTGTATATATTCAAACAACCATTTATGAGACCAGTACAAACTACTCAAG
AGGAAGATGGCTGTAGCTGCCGATTTCCAGAAGAAGAAGAAGGAGGATGTGAACTGGCTAGC
CTGAGAGTGAAGTTCAGCAGGAGCGCAGACGCCCCCGCGTACCAGCAGGGCCAGAACCAGCT
CTATAACGAGCTCAATCTAGGACGAAGAGAGGAGTACGATGTTTTGGACAAGAGACGTGGCC
GGGACCCTGAGATGGGGGGAAAGCCGCAGAGAAGGAAGAACCCTCAGGAAGGCCTGTACAAT
GAACTGCAGAAAGATAAGATGGCGGAGGCCTACAGTGAGATTGGGATGAAAGGCGAGCGCCG
GAGGGGCAAGGGGCACGATGGCCTTTACCAGGGTCTCAGTACAGCCACCAAGGACACCTACG
ACGCCCTTCACATGCAGGCCCTGCCCCCTCGCGCTAGC;
(SEQ ID NO: 84)
ATGCTCAGGCTGCTCTTGGCTCTCAACTTATTCCCTTCAATTCAAGTAACAGGAGGGCAGCT
TCAACTGGTAGAGAGTGGTGGAGGACTTGTTCAGCCTGGAGGGTCCCTTAGACTTAGTTGCG
CTGCCAGTGGGTTCACCCTGGACTACTACGCCATTGGCTGGTTTCGACAGGCCCCAGGGAAA
GAGCGAGAGGGGGTCTCTTACATCAGTAGTTCCGGTGGTTCCACTAACTACGCTGATAGTGT
GAAGGGGAGGTTTACTATTTCTCGGGATAATGCAAAAAATACCGTGTACCTGCAAATGAATA
GCCTCAAACCAGAAGACACAGGCGTTTATTCTTGCGCAGCAGCTGGGGGCTATGGTAACTCC
TCTCGCTACTGGGGTCAAGGAACCTCAGTCACCGTCTCCCCGACGCCAGCGCCAACTATTGC
GAGTCAGCCTCTCAGTCTGCGACCTGAGGCTTGTCGACCAGCAGCCGGAGGCGCAGTGCACA
CGAGGGGGCTGGACTTCGCCTGTGATCCTTCTAAGCCCTTTTGGGTGCTGGTGGTGGTTGGT
GGAGTCCTGGCTTGCTATAGCTTGCTAGTAACAGTGGCCTTTATTATTTTCTGGGTGAGGAA
ACGGGGCAGAAAGAAACTCCTGTATATATTCAAACAACCATTTATGAGACCAGTACAAACTA
CTCAAGAGGAAGATGGCTGTAGCTGCCGATTTCCAGAAGAAGAAGAAGGAGGATGTGAACTG
GCTAGCCTGAGAGTGAAGTTCAGCAGGAGCGCAGACGCCCCCGCGTACCAGCAGGGCCAGAA
CCAGCTCTATAACGAGCTCAATCTAGGACGAAGAGAGGAGTACGATGTTTTGGACAAGAGAC
GTGGCCGGGACCCTGAGATGGGGGGAAAGCCGCAGAGAAGGAAGAACCCTCAGGAAGGCCTG
TACAATGAACTGCAGAAAGATAAGATGGCGGAGGCCTACAGTGAGATTGGGATGAAAGGCGA
GCGCCGGAGGGGCAAGGGGCACGATGGCCTTTACCAGGGTCTCAGTACAGCCACCAAGGACA
CCTACGACGCCCTTCACATGCAGGCCCTGCCCCCTCGCGCTAGC;
(SEQ ID NO: 85)
ATGCTCAGGCTGCTCTTGGCTCTCAACTTATTCCCTTCAATTCAAGTAACAGGAGGGGAAGT
TCAGCTTGTTGAATCAGGCGGCGGAAGTGTCCAAGCTGGCGAAACCCTTCGGCTCTCCTGCA
CCGCATCCGGCTTCACATTCGATGATTCAGATATGGGCTGGTACAGGCAGGCTCCTGGTGAC
GAATGTGAGCTGGTATCCACAATCTCCAGCGATGGCAGCACAAATTATGCTGACTCTGTTAA
AGGGCGATTTACCATCTCTCAAGATAACGCAAAGAACACCGTGTATCTGCAGATGACCTCAT
TGAAGCCAGAGGATACTGCCATATATTCATGCAGAACAATGGCCTCGAGGATTGGTTGCTGG
GGCCAAGGGACTCTGGTCACTGTCTCTCCGACGCCAGCGCCAACTATTGCGAGTCAGCCTCT
CAGTCTGCGACCTGAGGCTTGTCGACCAGCAGCCGGAGGCGCAGTGCACACGAGGGGGCTGG
ACTTCGCCTGTGATCCTTCTAAGCCCTTTTGGGTGCTGGTGGTGGTTGGTGGAGTCCTGGCT
TGCTATAGCTTGCTAGTAACAGTGGCCTTTATTATTTTCTGGGTGAGGAAACGGGGCAGAAA
GAAACTCCTGTATATATTCAAACAACCATTTATGAGACCAGTACAAACTACTCAAGAGGAAG
ATGGCTGTAGCTGCCGATTTCCAGAAGAAGAAGAAGGAGGATGTGAACTGGCTAGCCTGAGA
GTGAAGTTCAGCAGGAGCGCAGACGCCCCCGCGTACCAGCAGGGCCAGAACCAGCTCTATAA
CGAGCTCAATCTAGGACGAAGAGAGGAGTACGATGTTTTGGACAAGAGACGTGGCCGGGACC
CTGAGATGGGGGGAAAGCCGCAGAGAAGGAAGAACCCTCAGGAAGGCCTGTACAATGAACTG
CAGAAAGATAAGATGGCGGAGGCCTACAGTGAGATTGGGATGAAAGGCGAGCGCCGGAGGGG
CAAGGGGCACGATGGCCTTTACCAGGGTCTCAGTACAGCCACCAAGGACACCTACGACGCCC
TTCACATGCAGGCCCTGCCCCCTCGCGCTAGC;
and
(SEQ ID NO: 86)
ATGCTCAGGCTGCTCTTGGCTCTCAACTTATTCCCTTCAATTCAAGTAACAGGAGGGCAAGT
TCAGCTTGTGGAGTCAGGCGGTGGACTCGTTCAAGCCGGAGGCTCACTGCGGTTGTCTTGTG
TCGCATCTGGTCGAACCTTCTCAAGTTATGCTATGGGGTGGTTCCGCCAGTCTCCTGGTAAA
GAGCGGGAATTTGTCGCAGCAATTTGTTGGTCTGGTGGTAACACTTACTATGCTGATTCAGT
AAAAGGTCGATTCACCATATCAGGGGATAATGCAAAAAATTCTGTCTATCTCCAAATGAACT
CTCTGAAGCCTGAAGATACTGCTGTGTATATCTGTAATGAGAGGACTACGGTACTACCTACG
GGTGCTATGGACTACTGGGGTCAAGGGACCTCAGTCACCGTCTCCTCGCCGACGCCAGCGCC
AACTATTGCGAGTCAGCCTCTCAGTCTGCGACCTGAGGCTTGTCGACCAGCAGCCGGAGGCG
CAGTGCACACGAGGGGGCTGGACTTCGCCTGTGATCCTTCTAAGCCCTTTTGGGTGCTGGTG
GTGGTTGGTGGAGTCCTGGCTTGCTATAGCTTGCTAGTAACAGTGGCCTTTATTATTTTCTG
GGTGAGGAAACGGGGCAGAAAGAAACTCCTGTATATATTCAAACAACCATTTATGAGACCAG
TACAAACTACTCAAGAGGAAGATGGCTGTAGCTGCCGATTTCCAGAAGAAGAAGAAGGAGGA
TGTGAACTGGCTAGCCTGAGAGTGAAGTTCAGCAGGAGCGCAGACGCCCCCGCGTACCAGCA
GGGCCAGAACCAGCTCTATAACGAGCTCAATCTAGGACGAAGAGAGGAGTACGATGTTTTGG
ACAAGAGACGTGGCCGGGACCCTGAGATGGGGGGAAAGCCGCAGAGAAGGAAGAACCCTCAG
GAAGGCCTGTACAATGAACTGCAGAAAGATAAGATGGCGGAGGCCTACAGTGAGATTGGGAT
GAAAGGCGAGCGCCGGAGGGGCAAGGGGCACGATGGCCTTTACCAGGGTCTCAGTACAGCCA
CCAAGGACACCTACGACGCCCTTCACATGCAGGCCCTGCCCCCTCGCGCTAGC.

[0046] In any aspect of the disclosure, or embodiments thereof, the mesothelin or fragment thereof is on the surface of a cell. In any aspect of the disclosure, or embodiments thereof, the mesothelin or fragment thereof is endogenously expressed by the cell.

### Definitions

[0047] Unless defined otherwise, all technical and scientific terms used herein have the meaning commonly understood by a person skilled in the art to which the various aspects and embodiments of the disclosure belongs. The following references provide one of skill with a general definition of many of the terms used in this disclosure: Singleton et al., Dictionary of Microbiology and Molecular Biology (2nd ed. 1994); The Cambridge Dictionary of Science and Technology (Walker ed., 1988); The Glossary of Genetics, 5th Ed., R. Rieger et al. (eds.), Springer Verlag (1991); and Hale & Marham, The Harper Collins Dictionary of Biology (1991). As used herein, the following terms have the meanings ascribed to them below, unless specified otherwise.

[0048] By “agent” is meant any small molecule chemical compound, nucleic acid molecule, or polypeptide, or fragments thereof. In various embodiments, the agent is a VHH polypeptide of the disclosure or a polynucleotide encoding the VHH polypeptide.

[0049] By “alteration” is meant a change in the structure, sequence, expression levels, or activity of an analyte, clinical indicator, polynucleotide or polypeptide as detected by standard art known methods, such as those described herein. The alteration can be an increase or a reduction.

[0050] By “analog” is meant a molecule that is not identical but has analogous functional or structural features. For example, a polypeptide analog retains the biological activity of a corresponding naturally-occurring polypeptide, while having certain biochemical modifications that enhance the analog's function relative to a naturally occurring polypeptide. Such biochemical modifications could increase the analog's protease resistance, membrane permeability, or half-life, without altering, for example, ligand binding. An analog may include an unnatural amino acid.

[0051] As used herein, the term “antibody” or “antigen-binding domain” refers to an immunoglobulin molecule, a nanobody, or a fragment thereof that specifically binds to, or is immunologically reactive with, a particular antigen. Non-limiting examples of antibodies or antigen-binding domains include VHH antibodies, polyclonal, monoclonal, genetically engineered and otherwise modified forms of antibodies, including but not limited to chimeric antibodies, humanized antibodies, heteroconjugate antibodies (e.g., bi- tri- and quad-specific antibodies, diabodies, triabodies, and tetrabodies), and antigen-binding fragments of antibodies, including e.g., Fab′, F(ab′)₂, Fab, Fv, rlgG, and scFv fragments, as well as engineered antibodies, which include CrossMabs (e.g., CrossMab^{Fabs}, CrossMab^{CH1-CL} and CrossMab^{VH-VL} formats), or fragments thereof. Moreover, unless otherwise indicated, the term “monoclonal antibody” (mAb) is meant to include both intact molecules, as well as antibody fragments (such as, for example, Fab and F(ab′)₂ fragments) that are capable of specifically binding to a target protein. Fab and F(ab′)₂ fragments lack the Fc fragment of an intact antibody, clear more rapidly from the circulation of the animal, and may have less non-specific tissue binding than an intact antibody (see Wahl et al., J. Nucl. Med. 24:316, 1983; incorporated herein by reference).

[0052] Antibody structure is well known in the art. Briefly, the variable (V) regions or domains of antibody heavy (H) and light (L) chains contain Complementarity-Determining Regions (CDRs), which bind to specific antigens or immunogens (e.g., protein antigens or immunogens). CDRs are situated within framework (FR) sequences of the V regions of the heavy (V_{H}) and light chains (V_{L}) of an antibody. CDRs are the most variable parts of antibodies and are critical components in the diversity of antigen specificities of antibodies produced by B lymphocytes. In general, three CDRs (CDR1, CDR2 and CDR3) are arranged consecutively in a V domain of an antibody. Because a VHH, such as a camelid VHH, is essentially a single chain antibody polypeptide, it contains three CDRs that bind to an antigen or target protein such as human mesothelin in the context of four framework (FR) regions, as follows: FR1-CDR1-FR2-CDR2-FR3-CDR3-FR4. Because most of the sequence variability associated with immunoglobulins and antigen binding is found in the CDRs, these regions are sometimes referred to as hypervariable regions. Typically, CDR1, CDR2 and CDR3 of VHHs contribute to and/or do not interfere with antigen binding. The CDRs of a number of anti-mesothelin VHHs described herein are shown, for example, in Tables 1, 3A, and 10A to 10M.

[0053] By “antigen” is meant an agent to which an antibody or other polypeptide capture molecule specifically binds. In an embodiment, the antigen is a tumor antigen. Exemplary antigens include small molecules, carbohydrates, proteins, and polynucleotides.

[0054] A “camelid VHH framework region (FR)” refers to the structural FR portions or components of a camelid VHH antibody or binding molecule, namely, FR1, FR2, FR4 and FR4, that positionally and structurally support the three CDR components, namely, CDR1, CDR2 and CDR3 of a VHH polypeptide, as described above. Similar to the FRs in conventional antibody polypeptides, the respective FR regions (FR1, FR2, FR3 and FR4) of the anti-mesothelin VHH polypeptides described herein are highly similar in sequence not only among different mesothelin binding VHHs but also among camelid VHH polypeptides that bind to other antigens, e.g., unrelated VHH polypeptides. (See, e.g., L. S. Mitchell and L. J. Colwell, 2018, Proteins, 86(7): 697-706 and A. M. Vattekatte et al., March, 2020, Peer J., 6(8):e8408. DOI: 10.7717/peerj.8408). Accordingly, the FR regions FR1, FR2, FR3 and FR4 of different VHHs do not vary significantly in sequence. By way of example, the below FR sequences of the VHH in the above-mentioned publication of Mitchell and Colwell are similar to the FR sequences of other VHHs, including the anti-mesothelin VHH polypeptides described herein.

FR1 (SEQ ID NO: 87):

| Position # | 1 | 2 | 3 | 4 | 5 | 6 | 7 | 8 | 9 | 10 | 11 | 12 | 13 |
|---|---|---|---|---|---|---|---|---|---|---|---|---|---|
| AA | Q | V | Q | L | Q | E | S | G | G | G | L | V | Q |
| | | | | | or | | | | | | or | | |
| | | | | | V | | | | | | S | | |

| Position # | 14 | 15 | 16 | 17 | 18 | 19 | 20 | 21 | 22 | 23 | 24 | 25 |
|---|---|---|---|---|---|---|---|---|---|---|---|---|
| AA | A | G | G | S | L | R | L | S | C | A | A | S |
| | or | | | | | | | | | | | |
| | P | | | | | | | | | | | |

FR2 (SEQ ID NO: 88):

| Position # | 36 | 37 | 38 | 39 | 40 | 41 | 42 | 43 | 44 | 45 | 46 | 47 | 48 | 49 |
|---|---|---|---|---|---|---|---|---|---|---|---|---|---|---|
| AA | W | F, | R | Q | A | P | G | K | E, | R | E | F, | V | A, |
| | | Y, | | | | | | | C, | or | | G, | | S, |
| | | or | | | | | | | or | L | | L, | | or |
| | | V | | | | | | | G | | | or | | T |
| | | | | | | | | | | | | W | | |

FR3 (SEQ ID NO: 89):

| Position # | 60 | 61 | 62 | 63 | 64 | 65 | 66 | 67 | 68 | 69 | 70 | 71 | 72 | 73 | 74 | 75 | 76 | 77 | 78 |
|---|---|---|---|---|---|---|---|---|---|---|---|---|---|---|---|---|---|---|---|
| AA | Y | A, | D | S | V | K | G | R | F | T | I | S | R | D | N | A | K | N | T |
| | | Q, | or | | or | | | | | or | or | | or | | or | | or | | |
| | | T, | E | | A | | | | | A | V | | Q | | K | | A | | |
| | | or | | | | | | | | | | | | | | | | | |
| | | V | | | | | | | | | | | | | | | | | |

| Position # | 79 | 80 | 81 | 82 | 83 | 84 | 85 | 86 | 87 | 88 | 89 | 90 | 91 | 92 | 93 | 94 | 95 | 96 |
|---|---|---|---|---|---|---|---|---|---|---|---|---|---|---|---|---|---|---|
| AA | V, | Y | L | Q | M | N | S | L | K | P | E | D | T | A | V, | Y | Y | C |
| | L, | | | | | or | or | | or | | or | | | or | I, | | | |
| | or | | | | | D | N | | R | | D | | | G | T, | | | |
| | M | | | | | | | | | | | | | | or | | | |
| | | | | | | | | | | | | | | | M | | | |

FR4 (SEQ ID NO: 90):

| Position # | 117 | 118 | 119 | 120 | 121 | 122 | 123 | 124 | 125 | 126 | 127 |
|---|---|---|---|---|---|---|---|---|---|---|---|
| AA | W | G | Q | G | T | Q | V | T | V | S | S |

[0055] It will be appreciated that the amino acid position numbers of the VHH FRs shown above are approximate and may vary to some degree in length or amino acid sequence depending on VHH length and on the start and termination amino acid positions of the VHH CDRs. Thus, substantial similarities exist among the structural FRs of camelid VHHs, independent of antigen binding specificity.

[0056] A “chimeric antibody” refers to an antibody in which a region of an antibody of one species (e.g., rodent, mouse or rat) is replaced with that from another species (e.g., a human) to achieve a more human-like antibody. Chimeric antibodies may be recombinantly generated by combining the variable light and heavy chain regions obtained from antibody producing cells of one species with the constant light and heavy chain regions from another. In general, chimeric antibodies utilize rodent (or other species, such as rabbit or camelid) variable regions and human constant regions in order to produce an antibody with predominantly human constant domains. The production of chimeric antibodies is well known in the art, and may be achieved by standard means, for example, as described in U.S. Pat. No. 5,624,659, incorporated fully herein by reference.

[0057] By “binding to” a molecule is meant having a physicochemical affinity for a molecule (e.g., a protein or protein antigen) or a region of the molecule, e.g., an epitope or antigenic determinant. Binding may be measured by any of the methods practiced in the art, e.g., using an antibody binding assay (e.g., ELISA) or an in vitro translation binding assay.

[0058] By “Chimeric Antigen Receptor” or alternatively a “CAR” is meant a polypeptide capable of providing an immune effector cell with specificity for a target cell. In embodiments, the target cell is a cancer cell. In some embodiments, a CAR comprises at least an extracellular antigen binding domain, a transmembrane domain and a cytoplasmic signaling domain comprising a functional signaling domain derived from a stimulatory molecule and/or costimulatory molecule. In embodiments, the stimulatory molecule is the zeta chain associated with the T cell receptor complex. In one embodiment, the cytoplasmic signaling domain further comprises one or more functional signaling domains derived from at least one costimulatory molecule. In one embodiment, the CAR comprises a chimeric fusion protein comprising an extracellular antigen binding domain, a transmembrane domain and an intracellular signaling domain comprising a functional signaling domain derived from a stimulatory molecule. In one embodiment, the CAR comprises a chimeric fusion protein comprising an extracellular antigen binding domain, a transmembrane domain and an intracellular signaling domain comprising a functional signaling domain derived from a costimulatory molecule and a functional signaling domain derived from a stimulatory molecule. In one embodiment, the CAR comprises a chimeric fusion protein comprising an extracellular antigen binding domain, a transmembrane domain and an intracellular signaling domain comprising two functional signaling domains derived from one or more costimulatory molecule(s) and a functional signaling domain derived from a stimulatory molecule. In one embodiment, the CAR comprises a chimeric fusion protein comprising an extracellular antigen binding domain, a transmembrane domain and an intracellular signaling domain comprising at least two functional signaling domains derived from one or more costimulatory molecule(s) and a functional signaling domain derived from a stimulatory molecule. In one embodiment the CAR comprises an optional leader sequence at the amino-terminus (N-ter) of the CAR fusion protein. In one embodiment, the CAR further comprises a leader sequence at the N-terminus of the extracellular antigen binding domain, wherein the leader sequence is optionally cleaved from the antigen binding domain (e.g., a VHH domain) during cellular processing and localization of the CAR to the cellular membrane.

[0059] In this disclosure, “comprises,” “comprising,” “containing” and “having” and the like can have the meaning ascribed to them in U.S. Patent law and can mean “includes,” “including,” and the like; “consisting essentially of” or “consists essentially” likewise has the meaning ascribed in U.S. Patent law and the term is open-ended, allowing for the presence of more than that which is recited so long as basic or novel characteristics of that which is recited is not changed by the presence of more than that which is recited, but excludes prior art embodiments. Any embodiments specified as “comprising” a particular component(s) or element(s) are also contemplated as “consisting of” or “consisting essentially of” the particular component(s) or element(s) in some embodiments.

[0060] The term “costimulatory molecule” refers to a cognate binding partner on a T cell that specifically binds with a costimulatory ligand, thereby mediating a costimulatory response by the T cell, such as, but not limited to, proliferation. Costimulatory molecules are cell surface molecules other than antigen receptors or their ligands that contribute to an efficient immune response. Costimulatory molecules include but are not limited to an MHC class I molecule, BTLA and a Toll ligand receptor, as well as OX40, CD27, CD28, CDS, ICAM-1, LFA-1 (CD11a/CD18), ICOS (CD278), and 4-1BB (CD137). Further examples of such costimulatory molecules include CDS, ICAM-1, GITR, BAFFR, HVEM (LIGHTR), SLAMF7, NKp80 (KLRF1), NKp44, NKp30, NKp46, CD160, CD19, CD4, CD8alpha, CD8beta, IL2R beta, IL2R gamma, IL7R alpha, ITGA4, VLA1, CD49a, ITGA4, IA4, CD49D, ITGA6, VLA-6, CD49f, ITGAD, CD11d, ITGAE, CD103, ITGAL, CD11a, LFA-1, ITGAM, CD11 b, ITGAX, CD11c, ITGB1, CD29, ITGB2, CD18, LFA-1, ITGB7, NKG2D, NKG2C, TNFR2, TRANCE/RANKL, DNAM1 (CD226), SLAMF4 (CD244, 2B4), CD84, CD96 (Tactile), CEACAMI, CRTAM, Ly9 (CD229), CD160 (BY55), PSGL1, CD100 (SEMA4D), CD69, SLAMF6 (NTB-A, Ly108), SLAM (SLAMF1, CD150, IPO-3), BLAME (SLAMF8), SELPLG (CD162), LTBR, LAT, GADS, SLP-76, PAG/Cbp, CD19a, and a ligand that specifically binds with CD83.

[0061] “Detect” refers to identifying the presence, absence or amount of the analyte to be detected.

[0062] By “detectable label” is meant a composition that when linked to a molecule of interest renders the latter detectable, via spectroscopic, photochemical, biochemical, immunochemical, or chemical means. For example, useful labels include radioactive isotopes, magnetic beads, metallic beads, colloidal particles, fluorescent dyes, electron-dense reagents, enzymes (for example, as commonly used in an ELISA), biotin, digoxigenin, or haptens.

[0063] By “disease” is meant any condition or disorder that damages or interferes with the normal function of a cell, tissue, or organ. Examples of diseases include neoplasias, such as tumors and cancers. In various instances, the cancer is a lung cancer, ovarian cancer, mesothelioma, pancreatic adenocarcinoma, lung squamous cell carcinoma, head and neck squamous cell carcinoma, cervical cancer, endometrial cancer, colorectal cancer, gastric cancer, esophageal cancer, or synovial sarcoma.

[0064] By “effective amount” is meant the amount of an agent required to ameliorate the symptoms of a disease relative to an untreated patient. The effective amount of active compound(s) used to practice the various aspects and embodiments of the present disclosure for therapeutic treatment of a disease varies depending upon the manner of administration, the age, body weight, and general health of the subject. Ultimately, the attending physician or veterinarian will decide the appropriate amount and dosage regimen. Such amount is referred to as an “effective” amount. In some embodiments, an effective amount induces killing of a cancer cell, reduces cancer cell survival, stabilizes tumor growth or cancer cell proliferation, or reduces tumor growth or cancer cell proliferation.

[0065] An “epitope tag” refers to a peptide or amino acid sequence (e.g., an epitope) that is fused, linked, or coupled to a protein, such as a recombinant protein produced by recombinant techniques, and that can be specifically bound by an antibody, e.g., an anti-tag monoclonal antibody or binding molecule that is directed to or generated against the tag peptide or amino acid sequence. Epitope tags are typically short peptide sequences (e.g., from about 5-30 amino acids, or sometimes up to 40 amino acids, that are selected because high-affinity antibodies can be reliably produced in many different species. Such anti-epitope tag antibodies are optimally not cross-reactive with other human peptides or polypeptides and typically do not generate an antibody response, e.g., an anti-tag antibody response, when administered or delivered to a subject. An epitope tag sequence that is fused to a protein provides for the detection and/or purification of the protein using an antibody, e.g., a monoclonal antibody, that specifically binds to the epitope tag. In an embodiment, the protein to which an epitope tag is fused, linked, or coupled is an antibody or VHH protein, e.g., a recombinantly produced antibody or VHH protein. In an embodiment, the VHH is an anti-mesothelin VHH antibody. In an embodiment, the protein, may include one or more epitope tags. In an embodiment, an epitope tag is coupled to the amino (NH) terminus of the protein, e.g., a VHH antibody as described herein. In an embodiment, an epitope tag is coupled to the carboxy (COOH) terminus of the protein, e.g., a VHH antibody as described herein. In an embodiment, an epitope tag is coupled to the NH and the COOH termini of the protein, e.g., a VHH antibody as described herein. An epitope tag sequence such as those described herein may be bound by anti-epitope tag antibodies, forming complexes which may facilitate clearance of the protein containing the tags from the body or system. (See, also, B. Brizzard and R. Chubet, 2001, Curr Protoc Neurosci., Chapter 5, Unit 5.8; DOI: 10.1002/0471142301.ns0508s00; R. Hernan et al., 2000, Biotechniques, 28(4):789-793; C. E. Fritze et al., 2000, Meths Enzymol., 327:3-16; doi: 10.1016/s0076-6879(00)27263-7; A. Einhauer et al., 2001, J Biochem Biophys Methods, 49(1-3):455-65, doi: 10.1016/s0165-022x(01)00213-5)).

[0066] Other molecules may serve as protein, amino acid sequence, or polynucleotide tags that are fused, linked, or coupled to a protein, such as a recombinant protein produced by recombinant techniques, e.g., an anti-mesothelin VHH antibody described herein. In an embodiment, the tag can be specifically bound by an antibody, e.g., an anti-tag monoclonal antibody or binding molecule that is directed to or generated against the tag peptide or amino acid sequence. Examples of tags include, without limitation, FLAG tags (peptide sequence DYKDDDDK (SEQ ID NO: 91) recognized by an anti-FLAG antibody), polyHistidine (His) tags (5-10 histidine residues (SEQ ID NO: 92) (HHHHHH (SEQ ID NO: 93)) bound by a nickel or cobalt chelate), E-tag, a peptide comprising amino acid sequence GAPVPYPDPLEPR (SEQ ID NO: 94) recognized by an antibody; an immunoglobulin Fc region or portion thereof, e.g., having effector or modulator function (Fc tag). In particular, Fc tags comprise a domain (effector domain) of an immunoglobulin molecule, e.g., IgG, which can be genetically linked to a peptide or protein. Ec fusion proteins (also known as Fe chimeric fusion proteins, Fc-Igs, Ig-based chimeric fusion proteins, and Fc-tag proteins) are composed of an Ig Fc domain that is fused, linked, or coupled (e.g., by recombinant techniques) to a peptide or protein, such as an anti-mesothelin VHH antibody described herein. The Fc domain portion of the fusion protein confers an advantageous characteristic to the protein, particularly in vivo, by greatly prolonging the half-life of the protein in plasma following administration to a subject. In an embodiment, an anti-mesothelin VHH antibody fused to an Fc region or Fc tag provides improved therapeutic efficacy as a biotherapeutic agent or drug. Fe fusion proteins also have uses in in vitro methods, including, e.g., immunohistochemistry (IHC), flow cytometry (FC), protein binding assays and use as microarray baits. In these applications, the Fc domain serves as a support to which proteins can be attached while retaining their native biological activity. In addition, the Fc domain can improve the in vivo and in vitro solubility and stability of the protein or peptide molecule to which it is coupled, fused, linked, or attached.

[0067] By “fragment” is meant a portion of a polypeptide or nucleic acid molecule. In embodiments, portion contains, at least 10%, 20%, 30%, 40%, 50%, 60%, 70%, 80%, or 90% of the entire length of the reference nucleic acid molecule or polypeptide. A fragment may contain 10, 20, 30, 40, 50, 60, 70, 80, 90, 100, 110, 120, 130, 140, 150, 200, 300, 400, 500, 600, 700, 800, 900, or 1000 nucleotides or amino acids.

[0068] A “framework (FR) region” or “FR region” includes amino acid residues that are adjacent to the CDRs in V_{H}, and V_{L} regions, and in VHHs. For example, FR region residues may be present in VHHs as described herein, camelid antibodies (VHHs), human antibodies, rodent-derived antibodies (e.g., murine and rat antibodies), humanized antibodies, primatized antibodies, chimeric antibodies, antibody fragments (e.g., Fab fragments), VHHs, single-chain antibody fragments (e.g., scFv fragments), antibody domains, and bispecific antibodies, among others.

[0069] The term “humanized” antibodies refers to forms of non-human (e.g., murine) antibodies, camelid-derived single domain antibody (sdAb) binding molecules, which are comprised of the heavy chain variable (V_{H}) region of heavy-chain-only antibodies (Abs) or VHHs. Humanized antibodies include chimeric immunoglobulins, immunoglobulin chains or fragments thereof (such as Fv, Fab, Fab′, F(ab′)₂ or other target-binding subdomains of antibodies) which contain minimal sequences derived from non-human immunoglobulin. In general, a humanized antibody or VHH may comprise substantially all of at least one variable domain (or two variable domains in the case of non-VHH antibodies), in which all or substantially all of the CDR regions correspond to those of a non-human immunoglobulin. All or substantially all of the FR regions of a humanized antibody may also be derived from a human immunoglobulin sequence. In the case of non-VHH antibodies, a VHH or a humanized antibody can also comprise at least a portion of an immunoglobulin constant region (Fc), which may be that of a human immunoglobulin consensus sequence. Techniques and protocols for humanizing antibodies (as well as VHHs) are known and practiced in the art, as described, for examples, in Riechmann et al., Nature, 332:323-7, 1988; Kasmiri et al., Methods, 36(1):25-34, 2005; U.S. Pat. Nos. 5,530,101; 5,585,089; 5,693,761; 5,693,762; and U.S. Pat. No. 6,180,370 to Queen et al; EP239400; WO 1991/09967; U.S. Pat. No. 5,225,539; EP592106; and EP519596, the contents of which are incorporated herein by reference. Humanized antibodies or VHHs are molecularly engineered to contain even more human-like immunoglobulin domains, and incorporate only the CDRs of the VHH or animal-derived monoclonal antibody by carefully examining the sequence of the hyper-variable loops of the V regions of the monoclonal antibody or VHH, and fitting them to the structure of the human antibody chains. This process is routinely and commonly carried out by one having skill in the art. See, e.g., U.S. Pat. No. 6,187,287, the contents of which are incorporated by reference herein.

[0070] By “increase” is meant to alter positively by at least 5% relative to a reference. An increase may be by 5%, 10%, 25%, 30%, 50%, 75%, or even by 100%.

[0071] An “intracellular signaling domain,” refers to portion of a molecule that transduces a signal from the surface of the cell to the interior of the cell. The intracellular signaling domain generates a signal that promotes an immune effector function of a CAR containing cell, e.g., a CART cell. Examples of immune effector function, e.g., in a CART cell, include cytolytic activity and helper activity, including the secretion of cytokines.

[0072] The terms “isolated,” “purified,” or “biologically pure” refer to material that is free to varying degrees from components which normally accompany it as found in its native state. “Isolate” denotes a degree of separation from original source or surroundings. “Purify” denotes a degree of separation that is higher than isolation. A “purified” or “biologically pure” protein is sufficiently free of other materials such that any impurities do not materially affect the biological properties of the protein or cause other adverse consequences. That is, a nucleic acid or peptide of this disclosure is purified if it is substantially free of cellular material, viral material, or culture medium when produced by recombinant DNA techniques, or chemical precursors or other chemicals when chemically synthesized. Purity and homogeneity are typically determined using analytical chemistry techniques, for example, polyacrylamide gel electrophoresis or high performance liquid chromatography. The term “purified” can denote that a nucleic acid or protein gives rise to essentially one band in an electrophoretic gel. For a protein that can be subjected to modifications, for example, phosphorylation or glycosylation, different modifications may give rise to different isolated proteins, which can be separately purified.

[0073] By “isolated polynucleotide” is meant a nucleic acid molecule that is free of the genes which, in the naturally-occurring genome of the organism from which the nucleic acid molecule of the disclosure is derived, flank the gene. The term therefore includes, for example, a recombinant DNA that is incorporated into a vector; into an autonomously replicating plasmid (e.g., a pLX311 plasmid or a pLX307 plasmid) or virus; or into the genomic DNA of a prokaryote or eukaryote; or that exists as a separate molecule (for example, a cDNA or a genomic or cDNA fragment produced by PCR or restriction endonuclease digestion) independent of other sequences. In addition, the term includes an RNA molecule that is transcribed from a DNA molecule, as well as a recombinant DNA that is part of a hybrid gene encoding additional polypeptide sequence.

[0074] By an “isolated polypeptide” is meant a polypeptide of the disclosure that has been separated from components that naturally accompany it. Typically, the polypeptide is isolated when it is at least 60%, by weight, free from the proteins and naturally-occurring organic molecules with which it is naturally associated. In embodiments, the preparation is at least 75%, at least 90%, and or at least 99%, by weight, a polypeptide of the disclosure. An isolated polypeptide of the disclosure may be obtained, for example, by extraction from a natural source, by expression of a recombinant nucleic acid encoding such a polypeptide; or by chemically synthesizing the protein. Purity can be measured by any appropriate method, for example, column chromatography, polyacrylamide gel electrophoresis, or by HPLC analysis.

[0075] By “marker” is meant any clinical indicator, analyte, protein or polynucleotide having an alteration in expression level or activity that is associated with a condition, disease, or disorder. A non-limiting example of a marker is a mesothelin polypeptide.

[0076] By “mesothelin polypeptide (MSLN)” is meant a protein with at least about 85% amino acid sequence identity to Genbank Accession No. AAH03512.1, or a fragment thereof that is immunogenic in a subject. An exemplary mesothelin amino acid sequence from Homo sapiens is provided below (GenBank: AAH03512.1):

(SEQ ID NO: 95)
>AAH03512.1 Mesothelin [Homo sapiens]
[sequence omitted]

[0077] By “mesothelin polynucleotide” is meant a nucleic acid molecule encoding a mesothelin polypeptide, as well as the introns, exons, 3′ untranslated regions, 5′ untranslated regions, and regulatory sequences associated with its expression, or fragments thereof. In embodiments, a mesothelin polynucleotide is the genomic sequence, cDNA, mRNA, or gene associated with and/or required for mesothelin expression. An exemplary mesothelin nucleotide sequence from Homo sapiens is provided below (GenBank: BC003512.1:418-2283):

>BC003512.1:418-2283 Homo sapiens mesothelin, mRNA (cDNA clone
MGC: 10686 IMAGE: 3611296), complete cds
(SEQ ID NO: 96)
ATGGCCTTGCCAACGGCTCGACCCCTGTTGGGGTCCTGTGGGACCCCCGCCCTCGGCAGCCT
CCTGTTCCTGCTCTTCAGCCTCGGATGGGTGCAGCCCTCGAGGACCCTGGCTGGAGAGACAG
GGCAGGCTGCACCCCTGGACGGAGTCCTGGCCAACCCACCTAACATTTCCAGCCTCTCCCCT
CGCCAACTCCTTGGCTTCCCGTGTGCGGAGGTGTCCGGCCTGAGCACGGAGCGTGTCCGGGA
GCTGGCTGTGGCCTTGGCACAGAAGAATGTCAAGCTCTCAACAGAGCAGCTGCGCTGTCTGG
CTCACCGGCTCTCTGAGCCCCCCGAGGACCTGGACGCCCTCCCATTGGACCTGCTGCTATTC
CTCAACCCAGATGCGTTCTCGGGGCCCCAGGCCTGCACCCGTTTCTTCTCCCGCATCACGAA
GGCCAATGTGGACCTGCTCCCGAGGGGGGCTCCCGAGCGACAGCGGCTGCTGCCTGCGGCTC
TGGCCTGCTGGGGTGTGCGGGGGTCTCTGCTGAGCGAGGCTGATGTGCGGGCTCTGGGAGGC
CTGGCTTGCGACCTGCCTGGGCGCTTTGTGGCCGAGTCGGCCGAAGTGCTGCTACCCCGGCT
GGTGAGCTGCCCGGGACCCCTGGACCAGGACCAGCAGGAGGCAGCCAGGGCGGCTCTGCAGG
GCGGGGGACCCCCCTACGGCCCCCCGTCGACATGGTCTGTCTCCACGATGGACGCTCTGCGG
GGCCTGCTGCCCGTGCTGGGCCAGCCCATCATCCGCAGCATCCCGCAGGGCATCGTGGCCGC
GTGGCGGCAACGCTCCTCTCGGGACCCATCCTGGCGGCAGCCTGAACGGACCATCCTCCGGC
CGCGGTTCCGGCGGGAAGTGGAGAAGACAGCCTGTCCTTCAGGCAAGAAGGCCCGCGAGATA
GACGAGAGCCTCATCTTCTACAAGAAGTGGGAGCTGGAAGCCTGCGTGGATGCGGCCCTGCT
GGCCACCCAGATGGACCGCGTGAACGCCATCCCCTTCACCTACGAGCAGCTGGACGTCCTAA
AGCATAAACTGGATGAGCTCTACCCACAAGGTTACCCCGAGTCTGTGATCCAGCACCTGGGC
TACCTCTTCCTCAAGATGAGCCCTGAGGACATTCGCAAGTGGAATGTGACGTCCCTGGAGAC
CCTGAAGGCTTTGCTTGAAGTCAACAAAGGGCACGAAATGAGTCCTCAGGTGGCCACCCTGA
TCGACCGCTTTGTGAAGGGAAGGGGCCAGCTAGACAAAGACACCCTAGACACCCTGACCGCC
TTCTACCCTGGGTACCTGTGCTCCCTCAGCCCCGAGGAGCTGAGCTCCGTGCCCCCCAGCAG
CATCTGGGCGGTCAGGCCCCAGGACCTGGACACGTGTGACCCAAGGCAGCTGGACGTCCTCT
ATCCCAAGGCCCGCCTTGCTTTCCAGAACATGAACGGGTCCGAATACTTCGTGAAGATCCAG
TCCTTCCTGGGTGGGGCCCCCACGGAGGATTTGAAGGCGCTCAGTCAGCAGAATGTGAGCAT
GGACTTGGCCACGTTCATGAAGCTGCGGACGGATGCGGTGCTGCCGTTGACTGTGGCTGAGG
TGCAGAAACTTCTGGGACCCCACGTGGAGGGCCTGAAGGCGGAGGAGCGGCACCGCCCGGTG
CGGGACTGGATCCTACGGCAGCGGCAGGACGACCTGGACACGCTGGGGCTGGGGCTACAGGG
CGGCATCCCCAACGGCTACCTGGTCCTAGACCTCAGCGTGCAAGAGGCCCTCTCGGGGACGC
CCTGCCTCCTAGGACCTGGACCTGTTCTCACCGTCCTGGCACTGCTCCTAGCCTCCACCCTG
GCCTGA.

[0078] A “nanobody” as used herein refers to a single-domain antibody or VHH. For example, a nanobody refers to an antibody fragment or portion which contains a single monomeric variable domain (V_{H}) naturally occurring in the Camelidae family or synthetically derived from the heavy chain of an antibody. Such single-domain binding molecules combine high antigen affinity in the absence of complement-dependent or cell-mediated cytotoxicity due to the lack of a constant (Fc) region in these molecules.

[0079] By “neoplasia” is meant a disease or disorder characterized by excess proliferation or reduced apoptosis. In embodiments, a neoplasia is a cancer or tumor. Illustrative neoplasms include breast cancer, esophageal cancer, head-and-neck cancer, pancreatic cancer, skin cancer, colorectal cancer, hepatocellular cancer, bladder cancer, bile duct cancer, luminal and non-luminal bladder cancer, basal bladder cancer, muscle-invasive bladder cancer, and non-muscle-invasive bladder cancer, pancreatic cancer, leukemias (e.g., acute leukemia, acute lymphocytic leukemia, acute myelocytic leukemia, acute myeloblastic leukemia, acute promyelocytic leukemia, acute myelomonocytic leukemia, acute monocytic leukemia, acute erythroleukemia, chronic leukemia, chronic myelocytic leukemia, chronic lymphocytic leukemia), polycythemia vera, lymphoma (Hodgkin's disease, non-Hodgkin's disease), Waldenstrom's macroglobulinemia, heavy chain disease, and solid tumors such as sarcomas and carcinomas (e.g., fibrosarcoma, myxosarcoma, liposarcoma, chondrosarcoma, osteogenic sarcoma, chordoma, angiosarcoma, endotheliosarcoma, lymphangiosarcoma, lymphangioendotheliosarcoma, synovioma, mesothelioma, Ewing's tumor, leiomyosarcoma, rhabdomyosarcoma, colon carcinoma, ovarian cancer, prostate cancer, squamous cell carcinoma, basal cell carcinoma, adenocarcinoma, sweat gland carcinoma, sebaceous gland carcinoma, papillary carcinoma, papillary adenocarcinomas, cystadenocarcinoma, medullary carcinoma, bronchogenic carcinoma, renal cell carcinoma, hepatoma, nile duct carcinoma, choriocarcinoma, seminoma, embryonal carcinoma, Wilm's tumor, liver cancer, cervical cancer, uterine cancer, testicular cancer, lung carcinoma, small cell lung carcinoma, bladder carcinoma, epithelial carcinoma, glioma, glioblastoma multiforme, astrocytoma, medulloblastoma, craniopharyngioma, ependymoma, pinealoma, hemangioblastoma, acoustic neuroma, oligodenroglioma, schwannoma, meningioma, melanoma, neuroblastoma, and retinoblastoma). In embodiments, the neoplasia may be colon adenocarcinoma (COAD), stomach adenocarcinoma (STAD), stomach cancer, and uterine corpus endometrial carcinoma (UCEC). In embodiments, the neoplasia may be a liquid tumor such as, for example, leukemia or lymphoma. In embodiments, the cancer is a colon, kidney, lung, pancreatic, renal (e.g., renal cell carcinoma or clear renal cell carcinoma), or skin cancer (e.g., a melanoma). In embodiments, the neoplasia is a mesothelioma, pancreatic adenocarcinoma, lung squamous cell carcinoma, head and neck squamous cell carcinoma, cervical cancer, endometrial cancer, colorectal cancer, gastric cancer, esophageal cancer, or synovial sarcoma.

[0080] As used herein, “obtaining” as in “obtaining an agent” includes synthesizing, purchasing, or otherwise acquiring the agent.

[0081] By “operably linked” is meant the connection between regulatory elements and one or more polynucleotides (genes) or a coding region. That is, gene expression is typically placed under the control of certain regulatory elements, including constitutive or inducible promoters, tissue-specific regulatory elements, and enhancers. A polynucleotide (gene or genes) or coding region is said to be “operably linked to” or “operatively linked to” or “operably associated with” the regulatory elements, meaning that the polynucleotide (gene or genes) or coding region is controlled or influenced by the regulatory elements. The one or more polynucleotides may be separated by spacers or linkers.

[0082] “Percentage of sequence identity” means the value determined by comparing two optimally aligned sequences over a comparison window, wherein the portion of the polynucleotide sequence in the comparison window may comprise additions, substitutions, or deletions (i.e., gaps) as compared to the reference sequence (which does not comprise additions, substitutions, or deletions) for optimal alignment of the two sequences. The percentage is calculated by determining the number of positions at which the identical nucleic acid base or amino acid residue occurs in both sequences to yield the number of matched positions, dividing the number of matched positions by the total number of positions in the window of comparison and multiplying the result by 100 to yield the percentage of sequence identity.

[0083] By “polypeptide” or “amino acid sequence” is meant any chain of amino acids, regardless of length or post-translational modification. In various embodiments, the post-translational modification is glycosylation or phosphorylation. In various embodiments, conservative amino acid substitutions may be made to a polypeptide to provide functionally equivalent variants, or homologs of the polypeptide. In some cases, the various aspects of the disclosure embrace sequence alterations that result in conservative amino acid substitutions. In some embodiments, a “conservative amino acid substitution” refers to an amino acid substitution that does not alter the relative charge or size characteristics of the protein in which the conservative amino acid substitution is made. Variants can be prepared according to methods for altering polypeptide sequence known to one of ordinary skill in the art such as are found in references that compile such methods, e.g., Molecular Cloning: A Laboratory Manual, J. Sambrook, et al., eds., Second Edition, Cold Spring Harbor Laboratory Press, Cold Spring Harbor, N.Y., 1989, or Current Protocols in Molecular Biology, F. M. Ausubel, et al., eds., John Wiley & Sons, Inc., New York. Non-limiting examples of conservative substitutions of amino acids include substitutions made among amino acids within the following groups: (a) M, I, L, V; (b) F, Y, W; (c) K, R, H; (d) A, G; (e) S, T; (f) Q, N; and (g) E, D. In various embodiments, conservative amino acid substitutions can be made to the amino acid sequence of the proteins and polypeptides disclosed herein.

[0084] By “reduce” is meant to alter negatively by at least 5% relative to a reference. A reduction may be by 5%, 10%, 25%, 30%, 50%, 75%, or even by 100%.

[0085] By “reference” is meant a standard or control condition. In embodiments, a reference cell is a cell that does not express one of the VHH polypeptides presented herein. In some embodiments, a reference is a non-VHH anti-mesothelin antibody that does not bind mesothelin.

[0086] A “reference sequence” is a defined sequence used as a basis for sequence comparison. A reference sequence may be a subset of or the entirety of a specified sequence; for example, a segment of a full-length cDNA or gene sequence, or the complete cDNA or gene sequence. For polypeptides, the length of the reference polypeptide sequence will generally be at least about 10 amino acids, at least about 20 amino acids, at least about 25 amino acids, at least about 35 amino acids, at least about 50 amino acids, or at least about 100 amino acids. For nucleic acids, the length of the reference nucleic acid sequence will generally be at least about 50 nucleotides, at least about 60 nucleotides, at least about 75 nucleotides, at least about 100 nucleotides, or at least about 300 nucleotides, or any integer thereabout or therebetween. In embodiments, a reference sequence is a VHH antibody or a fragment thereof that does not bind a target antigen. In some cases, a reference sequence is a VHH antibody or a fragment thereof that binds a target antigen.

[0087] By “specifically binds” is meant recognizes and binds a polypeptide of the disclosure, but which does not substantially recognize and bind other molecules in a sample. In embodiments, a capture molecule is a VHH domain or a fragment thereof. A VHH domain or fragment thereof that specifically binds to an antigen will bind to the antigen with a K_{D} of less than 100 nM. For example, a VHH domain or fragment thereof that specifically binds to an antigen will bind to the antigen with a K_{D} of up to 100 nM (e.g., between 1 pM and 100 nM). A VHH domain or fragment thereof that does not exhibit specific binding to a particular antigen or epitope thereof will exhibit a K_{D} of greater than 100 nM (e.g., greater than 500 nm, 1 uM, 100 uM, 500 uM, or 1 mM) for that particular antigen or epitope thereof. A variety of immunoassay formats may be used to select a VHH domain or fragment thereof that specifically immunoreactive with a particular protein or carbohydrate. For example, solid-phase ELISA immunoassays are routinely used to select VHH domains or fragments thereof specifically immunoreactive with a protein or carbohydrate. See, Harlow & Lane, Antibodies, A Laboratory Manual, Cold Spring Harbor Press, New York (1988) and Harlow & Lane, Using Antibodies, A Laboratory Manual, Cold Spring Harbor Press, New York (1999), for a description of immunoassay formats and conditions that can be used to determine specific immunoreactivity.

[0088] Nucleic acid molecules useful in the methods of the disclosure include any nucleic acid molecule that encodes a polypeptide of the disclosure or a fragment thereof. Such nucleic acid molecules need not be 100% identical with an endogenous nucleic acid sequence but will typically exhibit substantial identity. Polynucleotides having “substantial identity” to an endogenous sequence are typically capable of hybridizing with at least one strand of a double-stranded nucleic acid molecule. Nucleic acid molecules useful in the methods of the disclosure include any nucleic acid molecule that encodes a polypeptide of the disclosure or a fragment thereof. Such nucleic acid molecules need not be 100% identical with an endogenous nucleic acid sequence but will typically exhibit substantial identity. Polynucleotides having “substantial identity” to an endogenous sequence are typically capable of hybridizing with at least one strand of a double-stranded nucleic acid molecule. By “hybridize” is meant pair to form a double-stranded molecule between complementary polynucleotide sequences (e.g., a gene described herein), or portions thereof, under various conditions of stringency. (See, e.g., Wahl, G. M. and S. L. Berger (1987) Methods Enzymol. 152:399; Kimmel, A. R. (1987) Methods Enzymol. 152:507).

[0089] For example, stringent salt concentration will ordinarily be less than about 750 mM NaCl and 75 mM trisodium citrate, about less than about 500 mM NaCl and 50 mM trisodium citrate, or about less than about 250 mM NaCl and 25 mM trisodium citrate. Low stringency hybridization can be obtained in the absence of organic solvent, e.g., formamide, while high stringency hybridization can be obtained in the presence of at least about 35% formamide, or at least about 50% formamide. Stringent temperature conditions will ordinarily include temperatures of at least about 30° C., of at least about 37° C., or of at least about 42° C. Varying additional parameters, such as hybridization time, the concentration of detergent, e.g., sodium dodecyl sulfate (SDS), and the inclusion or exclusion of carrier DNA, are well known to those skilled in the art. Various levels of stringency are accomplished by combining these various conditions as needed. In one embodiment, hybridization will occur at 30° C. in 750 mM NaCl, 75 mM trisodium citrate, and 1% SDS. In another embodiment, hybridization will occur at 37° C. in 500 mM NaCl, 50 mM trisodium citrate, 1% SDS, 35% formamide, and 100 μg/ml denatured salmon sperm DNA (ssDNA). In another embodiment, hybridization will occur at 42° C. in 250 mM NaCl, 25 mM trisodium citrate, 1% SDS, 50% formamide, and 200 μg/ml ssDNA. Useful variations on these conditions will be readily apparent to those skilled in the art.

[0090] For most applications, washing steps that follow hybridization will also vary in stringency. Wash stringency conditions can be defined by salt concentration and by temperature. As above, wash stringency can be increased by decreasing salt concentration or by increasing temperature. For example, stringent salt concentration for the wash steps will be less than about 30 mM NaCl and 3 mM trisodium citrate, or less than about 15 mM NaCl and 1.5 mM trisodium citrate. Stringent temperature conditions for the wash steps will ordinarily include a temperature of at least about 25° C., of at least about 42° C., or of at least about 68° C. In one embodiment, wash steps will occur at 25° C. in 30 mM NaCl, 3 mM trisodium citrate, and 0.1% SDS. In another embodiment, wash steps will occur at 42 C in 15 mM NaCl, 1.5 mM trisodium citrate, and 0.1% SDS. In another embodiment, wash steps will occur at 68° C. in 15 mM NaCl, 1.5 mM trisodium citrate, and 0.1% SDS. Additional variations on these conditions will be readily apparent to those skilled in the art. Hybridization techniques are well known to those skilled in the art and are described, for example, in Benton and Davis (Science 196:180, 1977); Grunstein and Hogness (Proc. Natl. Acad. Sci., USA 72:3961, 1975); Ausubel et al. (Current Protocols in Molecular Biology, Wiley Interscience, New York, 2001); Berger and Kimmel (Guide to Molecular Cloning Techniques, 1987, Academic Press, New York); and Sambrook et al., Molecular Cloning: A Laboratory Manual, Cold Spring Harbor Laboratory Press, New York.

[0091] By “substantially identical” is meant a polypeptide or nucleic acid molecule exhibiting at least 50% identity to a reference amino acid sequence (for example, any one of the amino acid sequences described herein) or nucleic acid sequence (for example, any one of the nucleic acid sequences described herein). In embodiments, such a sequence is at least 60%, at least 80% or 85%, or at least about 90%, 95% or even 99% identical at the amino acid level or nucleic acid to the sequence used for comparison.

[0092] Sequence identity is typically measured using sequence analysis software (for example, Sequence Analysis Software Package of the Genetics Computer Group, University of Wisconsin Biotechnology Center, 1710 University Avenue, Madison, Wis. 53705, BLAST, BESTFIT, GAP, or PILEUP/PRETTYBOX programs). Such software matches identical or similar sequences by assigning degrees of homology to various substitutions, deletions, and/or other modifications. Conservative substitutions typically include substitutions within the following groups: glycine, alanine; valine, isoleucine, leucine; aspartic acid, glutamic acid, asparagine, glutamine; serine, threonine; lysine, arginine; and phenylalanine, tyrosine. In an exemplary approach to determining the degree of identity, a BLAST program may be used, with a probability score between e⁻³ and e⁻¹⁰⁰ indicating a closely related sequence.

[0093] By “subject” is meant an animal. The animal can be a mammal. The mammal can be a human or non-human mammal, such as a bovine, equine, canine, ovine, rodent, or feline.

[0094] Ranges provided herein are understood to be shorthand for all of the values within the range. For example, a range of 1 to 50 is understood to include any number, combination of numbers, or sub-range from the group consisting of 1, 2, 3, 4, 5, 6, 7, 8, 9, 10, 11, 12, 13, 14, 15, 16, 17, 18, 19, 20, 21, 22, 23, 24, 25, 26, 27, 28, 29, 30, 31, 32, 33, 34, 35, 36, 37, 38, 39, 40, 41, 42, 43, 44, 45, 46, 47, 48, 49, or 50.

[0095] “Transduction” refers to a process by which a polynucleotide is introduced or transferred into a cell. In an embodiment, the DNA or polynucleotide transduced into a cell is stably expressed in the cell. In some cases, the virus or virus vector is said to infect a cell.

[0096] As used herein, the terms “treat,” “treating,” “treatment,” and the like refer to reducing or ameliorating a disorder and/or symptoms associated therewith. It will be appreciated that, although not precluded, treating a disorder or condition does not require that the disorder, condition or symptoms associated therewith be completely eliminated.

[0097] As used herein, the term “vector” refers to a polynucleotide suitable for delivery of a gene sequence to a cell, or to a virus particle. Non-limiting examples of vectors include plasmids (e.g., a pLX311 plasmid or a pLX307 plasmid) and cosmids. A “vector” further refers to a nucleic acid (polynucleotide) molecule into which foreign nucleic acid can be inserted without disrupting the ability of the vector to be expressed in, replicate in, and/or integrate into a host cell. A variety of vectors have been developed for the delivery of polynucleotides encoding exogenous proteins into a prokaryotic or eukaryotic cell. A vector may contain a polynucleotide sequence that includes gene of interest (e.g., a heterologous gene, such as a therapeutic gene, or a reporter gene) as well as, for example, additional sequence elements capable of regulating transcription, translation, and/or the integration of these polynucleotide sequences into the genome of a cell. A vector may contain regulatory sequences, such as a promoter, e.g., a subgenomic promoter, region, and an enhancer region, which direct gene transcription. A vector may contain polynucleotide sequences (enhancer sequences) that enhance the rate of translation of these genes or improve the stability or nuclear export of the mRNA that results from gene transcription. These sequence elements may include, e.g., 5′ and 3′ untranslated regions, an internal ribosomal entry site (IRES), and/or a polyadenylation signal site to direct efficient transcription of a gene carried on the expression vector. Vectors, such as the viral particles described herein, may also be referred to as expression vectors.

[0098] As used herein, the term “vehicle” refers to a solvent, diluent, or carrier component of a pharmaceutical composition.

[0099] By “viral particle” is meant an agent capable of infecting a cell and that exists as an independent particle containing a core viral genome or polynucleotide, a capsid, which surrounds the genetic material and protects it, and an envelope of lipids surrounding the capsid. A viral particle may refer to the form of a virus before it infects a cell and becomes intracellular, or to the form of the virus that infects a cell.

[0100] By “VHH domain” is meant an antigen binding domain of a heavy chain only antibody or an antigen binding fragment thereof.

[0101] A “VHH binding molecule” or “VHH antibody,” or simply “VHH,” as referred to herein is, in general, a single domain immunoglobulin molecule (antibody). A VHH (or VHH antibody) corresponds to the heavy chain of a VHH antibody having a single variable domain (or single variable region), e.g., a camelid-derived single variable H (V_{H}) domain antibody. A VHH typically has a molecular weight (MW) of about 12-15 kDa. VHH antibodies lack light chains. These heavy-chain antibody molecules contain a single variable domain (VHH) and, typically, two constant domains (CH₂ and CH₃). See, e.g., Methods in Molecular Biology, “Single Domain Antibodies—Methods and Protocols,” Eds. D. Saerens and S. Muyldermans, Humana Press (Springer), 2012. A cloned (recombinantly produced) and isolated VHH domain is a stable polypeptide harboring the antigen-binding capacity of the original heavy-chain antibody. See, e.g., U.S. Pat. Nos. 5,840,526 and 6,015,695, each of which is incorporated by reference herein in its entirety.

[0102] VHHs are efficiently expressed in E. coli, coupled to detection markers, such as a fluorescent marker, or conjugated with enzymes. The small size of VHHs permits their binding to epitopes (antigenic determinants in antigen proteins), e.g., “hidden epitopes” that are not accessible to whole antibodies of much larger size. As a therapeutic, a VHH is capable of efficient penetration and rapid clearance. Its single domain nature allows a VHH to be expressed in a cell without a requirement for supramolecular assembly, as is needed for whole antibodies which are typically tetrameric (two heavy chains and two light chains, having a MW of about 150 kDa). VHHs are also exhibit stability over time and have a longer half-life versus non-VHH antibody molecules, which comprise disulfide bonds that are susceptible to chemical reduction or enzymatic cleavage. Similar to immunoglobulins, VHHs may be modified post-translationally, e.g., to add chemical linkers, detectable moieties, such as fluorescent dyes, enzymes, substrates, chemiluminescent moieties, etc., or specific binding moieties, such as streptavidin, avidin, or biotin, etc., for use in the compositions and methods described herein.

[0103] Unless specifically stated or obvious from context, as used herein, the term “or” is understood to be inclusive. Unless specifically stated or obvious from context, as used herein, the terms “a”, “an”, and “the” are understood to be singular or plural.

[0104] Unless specifically stated or obvious from context, as used herein, the term “about” is understood as within a range of normal tolerance in the art, for example within 2 standard deviations of the mean. Unless otherwise clear from context, all numerical values provided herein are modified by the term about.

[0105] The recitation of a listing of chemical groups in any definition of a variable herein includes definitions of that variable as any single group or combination of listed groups. The recitation of an embodiment for a variable or aspect herein includes that embodiment as any single embodiment or in combination with any other embodiments or portions thereof.

[0106] Any compositions or methods provided herein can be combined with one or more of any of the other compositions and methods provided herein.

### BRIEF DESCRIPTION OF THE DRAWINGS

[0107] FIG. 1 a multiple sequence alignment of anti-mesothelin VHH antibodies of the disclosure. Figure discloses SEQ ID NOS 61, 59, 58, 64, 60, 62, 57, 63, 55, 65, 56, and 66, respectively, in order of appearance.

[0108] FIG. 2 provides a schematic diagram relating to whole-cell vaccination using a DC2.4 cell line. Antigens of interest can be introduced to the DC2.4 cells through lentiviral transduction using a lentiviral vector containing a polynucleotide encoding an antigen of interest. Antigens expressed in the DC2.4 cells are presented by MHC class I and/or class II molecules on the surface of the cells. FIG. 2 provides a schematic diagram showing a strategy for immunizing animals using DC2.4 cells expressing a target antigen. The DC2.4 cells are stimulated with CpG oligodeoxynucleotides for about 4 hours prior to vaccinating an animal (e.g., a mouse) with about 5 million cells by intraperitoneal injection (IP) and subcutaneous injection. After about two weeks, the animals are administered a boost vaccination. After about two additional weeks, cells (e.g., antibody-producing B cells) are harvested from the animals, or the animals are administered further boost vaccinations.

[0109] FIG. 3 provides a schematic diagram showing a protocol for preparation and characterization of chimeric antigen receptors containing anti-mesothelin VHH domains that were produced by nanomice vaccinated using a live vaccine surface-presenting mesothelin.

[0110] FIG. 4 presents flow cytometry plots demonstrating that Jurkat cells surface-expressing chimeric antigen receptors (CARs) containing anti-mesothelin VHH domains provided herein as antigen binding domains were activated when cultured in the presence of target cells surface-expressing mesothelin (MSLN).

[0111] FIG. 5 provides plots showing activation of Jurkat cells surface-expressing chimeric antigen receptors (CARs) containing anti-mesothelin VHH domains provided herein as antigen binding domains were activated when cultured in the presence of target cells surface-expressing mesothelin (MSLN). In FIG. 5, “CAR-Ts only target_line” indicates Jurkat cells cultured in the absence of any target cells, “MSLN-target_line” indicates Jurkat cells co-cultured with cells that did not surface-present mesothelin, and “MSLN+target_line” indicates Jurkat cells co-cultured with target cells that surface-presented mesothelin. In FIG. 5 the top portion of each plot indicates the identity of the “MSLN+” target cells, namely either A549 cells, DC2.4 cells surface-expressing mesothelin, or K562 cells.

[0112] FIGS. 6A and 6B provide maps for a plasmid used in the Examples to express chimeric antigen receptors containing a VHH domain of the disclosure. FIG. 6A provides a map for the full plasmid and FIG. 6B provides a map for the portion of the plasmid encoding a chimeric antigen receptor linked to enhanced green fluorescent protein (eGFP) by way of a P2A self-cleaving peptide.

[0113] FIGS. 7A and 7B provide maps for a plasmid used in the Examples to detect activation of chimeric antigen receptor (CAR) T cells. FIG. 7A provides a map for the full plasmid and FIG. 7B provides a map of the portion of the plasmid corresponding to a reporter cassette.

[0114] FIGS. 8A to 8G provide flow cytometry contour plots, plots, and a flow cytometry histogram validating the ability of T cells expressing chimeric antigen receptors (CARs) containing anti-mesothelin (anti-MSLN) VHH domains of the disclosure (anti-MSLN CAR-T cells) as antigen binding domains to kill target tumor cells in mice. FIGS. 8A and 8B provide flow cytometry contour plots and a plot demonstrating expansion of anti-MSLN CAR-T cells expressing CARs containing the indicated antigen binding domains (i.e., Ab_113415, Ab_119702, Ab_119704, Ab_119706, and SS1). Expression of enhanced green fluorescent protein (eGFP) directly correlated with expression of the CARs in the cells. FIG. 8C provides a flow cytometry histogram demonstrating that >99% of K562_pLX311-MSLN target cancer cells (target K562 cells) administered to the mice surface expressed mesothelin. FIG. 8D provides a plot showing results from an in vitro cytotoxicity assay demonstrating the ability of the CAR-T cells to kill the target K562 cells. In FIG. 8D, “negative” indicates K562 cells that did not surface express mesothelin, and “positive” indicates K562 cells that surface expressed mesothelin. FIGS. 8E and 8F provide plots demonstrating the ability of the CAR-T cells to kill target K562 cells and control tumor growth in mice. The mice were subcutaneously administered 1.5e6 of target K562 cells prior to being administered 5e6 of the CAR-T cells via tail vein injection three days following administration of the target K562 cells. FIG. 8G provides a plot showing improved survival of mice administered the CAR-T cells. In FIGS. 8A to 8G the term “unmodified” refers to T cells that did not express a chimeric antigen receptor, the term “tumor only” refers to mice that were only administered the target K562 cells and no CAR-T cells, and the term “6-Well GREX” refers to G-Rex®6 Well Plates. The CARs were cloned and expressed in the cells as described in Example 1. The anti-MSLN antigen binding domain SS1 was used as a positive control. In FIG. 8G, the y-axis represents percent surviving mice and the x-axis represents time in days post tumor challenge.

[0115] FIGS. 9A and 9B provide plots and flow cytometry contour plots characterizing the ability of VHH antibodies of the disclosure to bind mesothelin (MSLN). FIG. 9A provides a plot demonstrating the ability of the indicated single domain antibody binding molecules to bind K562_pLX311-MSLN cells surface-expressing mesothelin. In FIG. 9A the term “Secondary Only” indicates cells contacted only with a secondary antibody and not with a single domain antibody binding molecule, “MSLN_pos” indicates cells surface expressing mesothelin, “MSLN_neg” indicates cells that did not surface express mesothelin, “w/MSLN” indicates cells contacted with media containing soluble mesothelin, and “w/o MSLN” indicates cells contacted with media that did not contain soluble mesothelin. FIG. 9B provides flow cytometry contour plots showing the ability of the CAR-T cells of FIGS. 8A to 8G to bind soluble mesothelin.

[0116] FIG. 10 provides overlaid flow cytometry histograms demonstrating the ability of VHH antibodies of the disclosure to bind mesothelin (MSLN) endogenously expressed on the surface of the AsPC-1 human pancreatic cell line. In FIG. 10, “Control” indicates cells that were not contacted with any VHH antibody of the disclosure, and “Commercial” indicates cells that were contacted with the commercially available antibody FAB32652A.

[0117] FIG. 11 provides a plot showing clustering of VHH antibody sequences of the disclosure. The starred data points indicate sequences corresponding to the indicated VHH antibody.

[0118] FIG. 12 provides a plot showing clustering of VHH antibody sequences of the disclosure. The starred data points indicate sequences corresponding to the indicated VHH antibody.

### DETAILED DESCRIPTION

[0119] Described herein are single domain antibody (sdAb) binding molecules, which are comprised of the heavy chain variable (V_{H}) region of heavy-chain-only antibodies (Abs), that specifically bind to a mesothelin polypeptide, in particular, a human mesothelin polypeptide expressed by a neoplastic cell. In some embodiments, the present disclosure provided chimeric antigen receptors (CAR) comprising a VHH polypeptide of the disclosure as an antigen binding domain, and cells (e.g., CAR-T cells) expressing the same.

[0120] Single-domain antibodies (camelid single-domain antibodies or nanobodies) are called VHHs as they derive from the V_{H} region of a class of heavy-chain-only antibodies. The anti-mesothelin VHHs were produced from immunized camelid animals (alpacas) and were selected for their ability to specifically bind to mesothelin. The anti-mesothelin VHHs as described herein are mesothelin-binding polypeptides comprising hypervariable variable regions (CDRs) within framework (FR) regions. In general, the FRs of the anti-mesothelin VHHs are typically highly similar in amino acid sequence or differ by conservative amino acid substitutions at certain positions of the FR sequences, among different anti-mesothelin VHHs or families of anti-mesothelin VHHs.

[0121] The anti-mesothelin VHHs as described herein provide advantageous properties, particularly for therapeutic use. By way of nonlimiting example, these sdAb molecules are small proteins (e.g., about 14 Kda), thus facilitating the cloning of their encoding polynucleotides. The anti-mesothelin VHHs can be functionally expressed at high levels, are stable to extreme pH and high temperatures over time, and function well in multimeric forms, e.g., dimers and other multimers, to provide improved binding and neutralization properties and therapeutic efficacy.

[0122] Chimeric antigen receptor (CAR) T cells expressing chimeric antigen receptors containing VHHs of the disclosure may be employed as therapeutic agents for the treatment and prevention of mesothelin-mediated and associated disorders, conditions, or diseases as described herein. In embodiments, a VHH of the disclosure is conjugated to a cytotoxic agent capable of killing a mesothelin-expressing neoplastic cell. It will be understood that the terms “anti-mesothelin VHH antibody,” “anti-mesothelin VHH polypeptide,” “anti-mesothelin VHH antibody polypeptide,” “anti-mesothelin VHH,” and “mesothelin VHH” are used interchangeably herein.

### Mesothelin

[0123] Mesothelin, also known as MSLN, is a protein that in humans is encoded by the MSLN gene. Mesothelin is a 40 kDa protein that is expressed in mesothelial cells. The protein was first identified by its reactivity with monoclonal antibody K1. Subsequent cloning studies showed that the mesothelin gene encodes a precursor protein that is processed to yield mesothelin which is attached to the cell membrane by a glycophosphatidylinositol linkage and a 31-kDa shed fragment named megakaryocyte-potentiating factor (MPF). Although it has been proposed that mesothelin may be involved in cell adhesion, its biological function is not known. A knockout mouse line that lacks mesothelin reproduces and develops normally.

[0124] Mesothelin is over expressed in several human tumors, including mesothelioma, ovarian cancer, pancreatic adenocarcinoma, lung adenocarcinoma, and cholangiocarcinoma. Mesothelin binds MUC16 (also known as CA125), indicating that the interaction of mesothelin and MUC16 may contribute to the implantation and peritoneal spread of tumors by cell adhesion. The region (residues 296-359) consisting of 64 amino acids at the N-terminus of cell surface mesothelin has been identified as the functional binding domain (named IAB) for MUC16/CA125, suggesting the mechanism of mesothelin acting as a MUC16/CA125 functional partner in cancer development.

[0125] Mesothelin is a tumor differentiation antigen that is normally present on the mesothelial cells lining the pleura, peritoneum and pericardium. Since mesothelin is overexpressed in several cancers, the protein could be exploited as tumor marker that may be detected using polypeptides of the present disclosure. For example, elevations of serum mesothelin specific to ovarian and other cancer patients may be measured using ELISA assays. Soluble mesothelin in the blood of a subject may correspond to mesothelin shed from tumor cells.

[0126] The present disclosure provides assays for blood-borne mesothelin for tumor diagnosis (e.g., as applied to asbestos-related mesothelioma). Elevated serum mesothelin was found in most patients with mesothelioma (71%) and ovarian cancer (67%). Blood mesothelin levels were correlated, with accuracy for malignant pleural mesothelioma and lung cancer (sensitivity 74% and 59%, specificity 90% and 86%, respectively for MPF and mesothelin assays). Circulating mesothelin is reported in nearly all pancreatic cancers. Increase of mesothelin-specific antibodies were also detected in the sera of about 40% of patients with mesothelioma and 42% with ovarian cancer, indicating an antibody response to mesothelin was correlated with high expression of mesothelin on tumor cells. https://en.wikipedia.org/wiki/Mesothelin-cite note-27

[0127] Further, the present disclosure provides methods for treating a subject having a neoplasia associated with over-expression of mesothelin. The methods may involve administering a polypeptide of the disclosure or antigen-binding fragment thereof, or a polynucleotide encoding the same, or a cell expressing a chimeric antigen receptor (CAR) containing the polypeptide or antigen-binding fragment thereof to the subject. In some instances, the polypeptide administered to the subject is an antibody-drug conjugate.

### VHH Antibodies

[0128] In various aspects, the disclosure provides VHH antibodies, also known as “nanobodies,” capable of binding a mesothelin antigen, as well as polypeptides containing VHH domains or polynucleotides encoding the same. In embodiments, the mesothelin bound by the VHH antibodies is associated with a disease or disorder, such as a neoplasia. In embodiments, the VHH binds an antigen associated with a target cell. In embodiments, the target cell is a neoplastic cell.

[0129] VHH domains are derived from nanobodies. Nanobodies are antibody-derived therapeutic proteins that contain the unique structural and functional properties of naturally-occurring heavy-chain antibodies. These heavy-chain antibodies contain a single variable domain (VHH) and two constant domains (CH2 and CH3). Importantly, a cloned and isolated VHH domain is a stable polypeptide harboring the full antigen-binding capacity of the original heavy-chain antibody. Nanobodies have a high homology with the VH domains of human antibodies and can be further humanized without any loss of activity. Importantly, Nanobodies have a low immunogenic potential, which has been confirmed in primate studies with Nanobody lead compounds.

[0130] Nanobodies combine the advantages of conventional antibodies with important features of small molecule drugs. Like conventional antibodies, nanobodies show high target specificity, high affinity for their target, and low inherent toxicity. However, like small molecule drugs they can inhibit enzymes and readily access receptor clefts. Furthermore, Nanobodies are stable, can be administered by means other than injection (see, e.g., WO2004041867A2, which is herein incorporated by reference in its entirety) and are easy to manufacture. Other advantages of Nanobodies include recognizing uncommon or hidden epitopes as a result of their small size, binding into cavities or active sites of protein targets with high affinity and selectivity due to their unique 3-dimensional, drug format flexibility, tailoring of half-life and ease and speed of drug discovery.

[0131] Nanobodies are encoded by single genes and are efficiently produced in almost all prokaryotic and eukaryotic hosts, e.g., E. coli (see, e.g., U.S. Pat. No. 6,765,087, which is herein incorporated by reference in its entirety), molds (for example Aspergillus or Trichoderma) and yeast (for example Saccharomyces, Kluyveromyces, Hansenula, or Pichia) (see, e.g., U.S. Pat. No. 6,838,254, which is herein incorporated by reference in its entirety).

[0132] VHHs, such as the anti-mesothelin VHHs described herein, have a number of advantages over conventional antibodies and recombinant antibody domains, including (i) they are small monomeric proteins (14 kDa) that express and fold efficiently in recombinant hosts; (ii) they are more stable to extremes of pH and temperature compared with conventional antibodies; (iii) they typically bind conformational epitopes; and (iv) they are amenable to designed multimerization which often leads to higher potencies; and (v) they offer more therapeutic versatility, such as multispecificity, thus supporting their beneficial utility in treating diseases caused by or associated with mesothelin.

[0133] The amino acid sequences of representative anti-mesothelin VHH antibodies described herein are provided in Table 1 below, and the corresponding polynucleotide sequences encoding each of the representative anti-mesothelin VHH antibodies are provided in Table 2 below. Representative embodiments of the binding regions of the anti-mesothelin VHHs include CDRs (CDR1, CDR2 and CDR3) as set forth in the sequences of representative anti-mesothelin VHHs are presented in Table 3A below. The CDR binding regions are positioned within framework (FR) regions of the VHH polypeptide (see Table 3B), which do not vary substantially in sequence between discrete anti-mesothelin VHHs and which provide a “structural scaffold” for the CDRs, which bind to mesothelin. By way of non-limiting example, the binding of CDRs within FRs to a target protein (antigen), e.g., mesothelin, may be via conformational binding or interaction, electrostatic binding interaction, hydrogen bonding, Van der Waals forces, or hydrophobic bonding, or combinations thereof, as would be appreciated by those having skill in the art.

TABLE 1
Anti-mesothelin VHH antibody amino acid sequences.

| VHH Antibody Name | Full-Length Amino Acid Sequence |
|---|---|
| M3_C7 | QVQLVESGGGLVQAGGSLRLSCVASGRTFSSYAMGWFRQSPGKER |
| | EFVAAICWSGGNTYYADSVKGRFTISGDNAKNSVYLQMNSLKPED |
| | TAVYICNERTTVLPTGAMDYWGQGTSVTVSS |
| | (SEQ ID NO: 55) |
| Ab_113415 | QVQLVESGGGLVQPGGSLRLSCAASGSMFSINAVAWYRQAPGEQR |
| | EPVAAMTSGGSTIYADSVKGRFTISRDNAKNTVYLQMSSLKPEDT |
| | AVYYCNGGWSLAMDYWGQGTSVTVS |
| | (SEQ ID NO: 56) |
| Ab_119706 | QLQLVESGGGLVQPGGSLRLSCAASGFTLDYYAIGWFRQAPGKER |
| | EGVSYISSSGGSTNYADSVKGRFTISRDNAKNTVYLQMNSLKPED |
| | TGVYSCAAAGGYGNSSRYWGQGTSVTVS |
| | (SEQ ID NO: 57) |
| Ab_119699 | QVQLVESGGGLVQPGGSLRLSCAASGSIFSVNAMGYYRQISTKQR |
| | NLVAAINTGGGSTYYADSVKGRFTISWDNANNTLFLQMNSLKSED |
| | TAVYYCAAEDFGNSKTYWGQGTLVTVS |
| | (SEQ ID NO: 58) |
| Ab_119702 | DVQLVESGGGLVQAGGSLRLSCAASGFPYFSCCMSWHRQAPGKDR |
| | ELVSSISSDGSTHYADSVRGRFTISKGNARNTLYLQMNSLKPEDT |
| | AVYFCAASPRQLGPYYAMDYWGQGTSVTVS |
| | (SEQ ID NO: 59) |
| Ab_119704 | QLQLVESGGGLVQPGGSLRLSCAASGFTLDNYAIGWFRQAPGKER |
| | EGVSSISSSGGSTNYADSVKGRFTVSRDNAKHTVYLQMNSLKPED |
| | TAVYYCAGVGDYGRRAMGQGTSVTVS |
| | (SEQ ID NO: 60) |
| Ab_119707 | EVQLVESGGGSVQAGETLRLSCTASGFTFDDSDMGWYRQAPGDEC |
| | ELVSTISSDGSTNYADSVKGRFTISQDNAKNTVYLQMTSLKPEDT |
| | AIYSCRTMASRIGCWGQGTLVTVS (SEQ ID NO: 61) |
| M1_C8 | QLQLVESGGGLVQPGGSLRLSCAASGFTLDNYAIGWFRQAPGKER |
| | EGVSSISSSGGSTNYADSVKGRFTVSRDNAKQTVYLQMNSLKPED |
| | TAVYYCAGVGDYGRRAMGQGTSVTVS (SEQ ID NO: 62) |
| M3_C3 | QLQLVESGGGLVQPGGSLRLSCAASGFTLDYFAIGWFRQAPGKER |
| | EGVSYISSSGDSTNYADTVKGRFTISRDNAKNTVYLQMNSLKPED |
| | TGVYSCAAAGGYGNSSRYWGQGTSVTVS (SEQ ID NO: 63) |
| Ab_119700 | QLQLVESGGGLVQPGGSLRLTCAASGFTLDNYAIGWFRQAPGKER |
| | EGVSSISSSGGSTNYADSVKGRFTVSRDNAKHTVYLQMNSLKPED |
| | TAVYYCAGVGDYGRRAMGQGTSVTVS (SEQ ID NO: 64) |
| M3_C6 | QVQLVESGGGLVQAGGSLRLSCAASGRNFSSYPMGWFRQAPGKER |
| | EFVAAISWSGGRTFYAASVKGRFTISRDTAKNSVYLQMNSLKPED |
| | TAVYICNERTTVLPTGAMDYWGQGTSVTVS (SEQ ID NO: 65) |
| Ab_119696 | QVQLVESGGGLVQPGGSLRLSCAASGSMFSINAVAWYRQAPGEQR |
| | EPVAAMTSGGSTIYADSVKGRFTISRDNAKNTVYLQMNSLKPEDT |
| | AVYYCNGGWSLAMDYWGQGTSVTVS (SEQ ID NO: 66) |

TABLE 2
Anti-mesothelin VHH antibody nucleotide sequences.

| VHH Antibody | |
|---|---|
| Name | Nucleotide Sequence |
| M3_C7 | CAAGTTCAGCTTGTGGAGTCAGGCGGTGGACTCGTTCAAGCCGGAGGCT |
| | CACTGCGGTTGTCTTGTGTCGCATCTGGTCGAACCTTCTCAAGTTATGC |
| | TATGGGGTGGTTCCGCCAGTCTCCTGGTAAAGAGCGGGAATTTGTCGCA |
| | GCAATTTGTTGGTCTGGTGGTAACACTTACTATGCTGATTCAGTAAAAG |
| | GTCGATTCACCATATCAGGGGATAATGCAAAAAATTCTGTCTATCTCCA |
| | AATGAACTCTCTGAAGCCTGAAGATACTGCTGTGTATATCTGTAATGAG |
| | AGGACTACGGTACTACCTACGGGTGCTATGGACTACTGGGGTCAAGGGA |
| | CCTCAGTCACCGTCTCCTCG |
| | (SEQ ID NO: 69) |
| Ab_113415 | CAAGTTCAGCTTGTCGAGAGTGGTGGAGGATTGGTGCAGCCAGGCGGAT |
| | CTCTCAGACTTTCCTGCGCCGCCAGTGGTTCTATGTTTTCCATAAATGC |
| | AGTGGCCTGGTACAGGCAAGCACCAGGCGAGCAAAGGGAACCGGTAGCC |
| | GCAATGACCTCTGGAGGTAGTACAATTTACGCTGATAGCGTCAAGGGAC |
| | GATTCACAATATCACGAGACAATGCCAAGAACACTGTCTACCTTCAAAT |
| | GAGCAGTTTGAAACCTGAGGATACAGCAGTATACTACTGCAATGGAGGA |
| | TGGTCACTGGCTATGGACTACTGGGGTCAAGGAACCTCAGTCACCGTCT |
| | CC |
| | (SEQ ID NO: 70) |
| Ab_119706 | CAGCTTCAACTGGTAGAGAGTGGTGGAGGACTTGTTCAGCCTGGAGGGT |
| | CCCTTAGACTTAGTTGCGCTGCCAGTGGGTTCACCCTGGACTACTACGC |
| | CATTGGCTGGTTTCGACAGGCCCCAGGGAAAGAGCGAGAGGGGGTCTCT |
| | TACATCAGTAGTTCCGGTGGTTCCACTAACTACGCTGATAGTGTGAAGG |
| | GGAGGTTTACTATTTCTCGGGATAATGCAAAAAATACCGTGTACCTGCA |
| | AATGAATAGCCTCAAACCAGAAGACACAGGCGTTTATTCTTGCGCAGCA |
| | GCTGGGGGCTATGGTAACTCCTCTCGCTACTGGGGTCAAGGAACCTCAG |
| | TCACCGTCTCC |
| | (SEQ ID NO: 71) |
| Ab_119699 | CAGGTTCAGCTGGTGGAGTCCGGCGGAGGTCTTGTTCAGCCCGGAGGTT |
| | CCCTGCGCCTCTCTTGTGCAGCTTCTGGTTCCATTTTCTCAGTCAATGC |
| | AATGGGCTACTACAGACAAATTTCCACAAAGCAGCGCAACTTGGTCGCC |
| | GCAATAAATACTGGTGGTGGCTCGACTTATTACGCCGATAGTGTCAAAG |
| | GACGATTTACTATAAGTTGGGACAACGCAAACAATACTTTGTTCCTCCA |
| | AATGAATAGCCTCAAATCAGAAGACACTGCCGTCTACTACTGTGCAGCA |
| | GAGGACTTTGGTAACTCGAAAACTTACTGGGGCCAAGGGACTCTGGTCA |
| | CTGTCTCT |
| | (SEQ ID NO: 72) |
| Ab_119702 | GACGTACAACTTGTGGAATCAGGTGGGGGTCTCGTTCAAGCTGGTGGGT |
| | CACTGCGGCTTTCTTGCGCTGCAAGTGGGTTCCCTTATTTTTCCTGCTG |
| | TATGAGCTGGCATCGCCAAGCTCCTGGAAAAGATCGGGAACTGGTCTCC |
| | AGTATTTCATCTGACGGGTCAACACATTACGCTGATAGCGTCAGGGGGA |
| | GGTTTACTATTTCTAAAGGAAATGCAAGAAACACACTCTACCTCCAGAT |
| | GAACAGTCTGAAGCCCGAAGACACCGCCGTGTATTTCTGTGCAGCTTCC |
| | CCTAGACAGCTCGGGCCTTACTATGCTATGGACTACTGGGGTCAAGGAA |
| | CCTCAGTCACCGTCTCC |
| | (SEQ ID NO: 73) |
| Ab_119704 | CAGCTTCAACTGGTAGAGAGTGGTGGAGGACTTGTTCAGCCTGGAGGGT |
| | CCCTTAGACTTAGTTGCGCTGCCAGTGGGTTCACCCTGGACAACTACGC |
| | CATTGGCTGGTTTCGACAGGCCCCAGGGAAAGAGCGAGAGGGGGTCTCT |
| | AGCATCAGTAGTTCCGGTGGTTCCACCAACTATGCTGATAGTGTGAAGG |
| | GGAGGTTTACTGTTTCTCGGGATAATGCAAAACATACCGTGTACCTGCA |
| | AATGAATAGCCTCAAACCAGAAGACACAGCCGTCTATTATTGCGCAGGA |
| | GTTGGGGACTACGGTAGAAGGGCGATGGGTCAAGGCACCTCAGTCACCG |
| | TCTCC |
| | (SEQ ID NO: 74) |
| Ab_119707 | GAAGTTCAGCTTGTTGAATCAGGGGGGGGAAGTGTCCAAGCTGGCGAAA |
| | CCCTTCGGCTCTCCTGCACCGCATCCGGCTTCACATTCGATGATTCAGA |
| | TATGGGCTGGTACAGGCAGGCTCCTGGTGACGAATGTGAGCTGGTATCC |
| | ACAATCTCCAGCGATGGCAGCACAAATTATGCTGACTCTGTTAAAGGGC |
| | GATTTACCATCTCTCAAGATAACGCAAAGAACACCGTGTATCTGCAGAT |
| | GACCTCATTGAAGCCAGAGGATACTGCCATATATTCATGCAGAACAATG |
| | GCCTCGAGGATTGGTTGCTGGGGCCAAGGGACTCTGGTCACTGTCTCT |
| | (SEQ ID NO: 75) |
| M1_C8 | CAGCTTCAACTGGTAGAGAGTGGTGGAGGACTTGTTCAGCCTGGAGGGT |
| | CCCTTAGACTTAGTTGCGCTGCCAGTGGATTCACCCTGGACAACTACGC |
| | CATTGGCTGGTTTCGACAGGCCCCAGGGAAAGAGCGAGAGGGGGTCTCT |
| | AGTATCAGTAGTTCCGGTGGTTCCACCAACTATGCCGATAGTGTGAAGG |
| | GGAGGTTTACTGTTTCTCGGGATAATGCAAAACAAACCGTGTACCTGCA |
| | AATGAATAGCCTCAAACCAGAAGACACAGCCGTCTATTATTGCGCAGGA |
| | GTTGGGGACTACGGTAGAAGGGCGATGGGTCAAGGCACCTCAGTCACCG |
| | TCTCC (SEQ ID NO: 76) |
| M3_C3 | CAGCTTCAACTGGTAGAGAGTGGTGGAGGACTTGTTCAGCCTGGAGGGT |
| | CCCTTAGACTTAGTTGCGCTGCCAGTGGGTTCACCCTGGACTACTTCGC |
| | CATTGGCTGGTTTCGACAGGCCCCAGGGAAAGAGCGAGAGGGGGTCTCT |
| | TACATCAGTAGTTCCGGTGATTCCACTAACTACGCTGATACTGTGAAGG |
| | GGAGGTTTACTATTTCTCGGGATAATGCAAAAAATACCGTGTACCTGCA |
| | AATGAATAGCCTCAAACCAGAAGACACAGGCGTTTATTCTTGCGCAGCA |
| | GCTGGGGGCTATGGTAACTCCTCTCGCTACTGGGGTCAAGGAACCTCAG |
| | TCACCGTCTCC (SEQ ID NO: 77) |
| Ab_119700 | CAGCTTCAACTGGTAGAGAGTGGTGGAGGACTTGTTCAGCCTGGAGGGT |
| | CCCTTAGACTTACTTGCGCTGCCAGTGGGTTCACCCTGGACAACTACGC |
| | CATTGGCTGGTTTCGACAGGCCCCAGGGAAAGAGCGAGAGGGGGTCTCT |
| | AGCATCAGTAGTTCCGGTGGTTCCACCAACTATGCTGATAGTGTGAAGG |
| | GGAGGTTTACTGTTTCTCGGGATAATGCAAAACATACCGTGTACCTGCA |
| | AATGAATAGCCTCAAACCAGAAGACACAGCCGTCTATTATTGCGCAGGA |
| | GTTGGGGACTACGGTAGAAGGGCGATGGGTCAAGGCACCTCAGTCACCG |
| | TCTCC (SEQ ID NO: 78) |
| M3_C6 | GAAGTTCAGCTTGTTGAATCAGGGGGGGGAAGTGTCCAAGCTGGCGAAA |
| | CCCTTCGGCTCTCCTGCACCGCATCCGGCTTCACATTCGATGATTCAGA |
| | TATGGGCTGGTACAGGCAGGCTCCTGGTGACGAATGTGAGCTGGTATCC |
| | ACAATCTCCAGCGATGGCAGCACAAATTATGCTGACTCTGTTAAAGGGC |
| | GATTTACCATCTCTCAAGATAACGCAAAGAACACCGTGTATCTGCAGAT |
| | GACCTCATTGAAGCCAGAGGATACTGCCATATATTCATGCAGAACAATG |
| | GCCTCGAGGATTGGTTGCTGGGGCCAAGGGACTCTGGTCACTGTCTCT |
| | (SEQ ID NO: 75) |
| Ab_119696 | CAAGTCCAGCTCGTCGAGAGTGGTGGAGGATTGGTGCAGCCAGGCGGAT |
| | CTCTCAGACTTTCCTGCGCCGCCAGTGGTTCTATGTTTTCCATAAATGC |
| | AGTGGCCTGGTACAGGCAAGCACCAGGCGAGCAAAGGGAACCGGTAGCC |
| | GCAATGACCTCTGGAGGTAGTACAATTTACGCTGATAGCGTCAAGGGAC |
| | GATTCACAATATCACGAGACAATGCCAAGAACACTGTCTACCTTCAAAT |
| | GAACAGTTTGAAACCTGAGGATACAGCAGTATACTACTGCAATGGAGGA |
| | TGGTCACTGGCTATGGACTACTGGGGTCAAGGAACCTCAGTCACCGTCT |
| | CC (SEQ ID NO: 79) |
| M1_C8 | CAGCTTCAACTGGTAGAGAGTGGTGGAGGACTTGTTCAGCCTGGAGGGT |
| | CCCTTAGACTTAGTTGCGCTGCCAGTGGATTCACCCTGGACAACTACGC |
| | CATTGGCTGGTTTCGACAGGCCCCAGGGAAAGAGCGAGAGGGGGTCTCT |
| | AGTATCAGTAGTTCCGGTGGTTCCACCAACTATGCCGATAGTGTGAAGG |
| | GGAGGTTTACTGTTTCTCGGGATAATGCAAAACAAACCGTGTACCTGCA |
| | AATGAATAGCCTCAAACCAGAAGACACAGCCGTCTATTATTGCGCAGGA |
| | GTTGGGGACTACGGTAGAAGGGCGATGGGTCAAGGCACCTCAGTCACCG |
| | TCTCC (SEQ ID NO: 76) |

TABLE 3A
Representative embodiments of complementarity determining regions of anti-
mesothelin VHH antibodies of the disclosure.

| VHH Antibody | | | |
|---|---|---|---|
| Name | CDR1 | CDR2 | CDR3 |
| M3_C7 | GRTFSSYA (SEQ | ICWSGGNT (SEQ ID | NERTTVLPTGAMDY |
| | ID NO: 1) | NO: 2) | (SEQ ID NO: 3) |
| Ab_113415 | GSMFSINA (SEQ | MTSGGST (SEQ ID | NGGWSLAMDY (SEQ ID |
| | ID NO: 4) | NO: 5) | NO: 6) |
| Ab_119706 | GFTLDYYA (SEQ | ISSSGGST (SEQ ID | AAAGGYGNSSRY (SEQ |
| | ID NO: 7) | NO: 8) | ID NO: 9) |
| Ab_119699 | GSIFSVNA (SEQ | INTGGGST (SEQ ID | AAEDFGNSKTY (SEQ |
| | ID NO: 10) | NO: 11) | ID NO: 12) |
| Ab_119702 | GFPYFSCC (SEQ | ISSDGST (SEQ ID | AASPRQLGPYYAMDY |
| | ID NO: 13) | NO: 14) | (SEQ ID NO: 15) |
| Ab_119704 | GFTLDNYA (SEQ | ISSSGGST (SEQ ID | AGVGDYGRRA (SEQ ID |
| | ID NO: 16) | NO: 8) | NO: 17) |
| Ab_119707 | GFTFDDSD (SEQ | ISSDGST (SEQ ID | RTMASRIGC (SEQ ID |
| | ID NO: 18) | NO: 14) | NO: 19) |
| M1_C8 | GFTLDNYA (SEQ | ISSSGGST (SEQ ID | AGVGDYGRRA (SEQ ID |
| | ID NO: 16) | NO: 8) | NO: 17) |
| M3_C3 | GFTLDYFA (SEQ | ISSSGDST (SEQ ID | AAAGGYGNSSRY (SEQ |
| | ID NO: 97) | NO: 99) | ID NO: 9) |
| Ab_119700 | GFTLDNYA (SEQ | ISSSGGST (SEQ ID | AGVGDYGRRA (SEQ ID |
| | ID NO: 16) | NO: 8) | NO: 17) |
| M3_C6 | GRNFSSYP (SEQ | ISWSGGRT (SEQ ID | NERTTVLPTGAMDY |
| | ID NO: 98) | NO: 100) | (SEQ ID NO: 3) |
| Ab_119696 | GSMFSINA (SEQ | MTSGGST (SEQ ID | NGGWSLAMDY (SEQ ID |
| | ID NO: 4) | NO: 5) | NO: 6) |

TABLE 3B
Framework regions of anti-mesothelin VHH antibodies of the disclosure.

| VHH Antibody | | |
|---|---|---|
| Name | FR1 | FR2 |
| M3_C7 | QVQLVESGGGLVQAGGSLRLSCVAS (SEQ | MGWFRQSPGKEREFVA |
| | ID NO: 101) | A (SEQ ID NO: |
| | | 108) |
| Ab_113415 | QVQLVESGGGLVQPGGSLRLSCAAS (SEQ | VAWYRQAPGEQREPVA |
| | ID NO: 102) | A (SEQ ID NO: |
| | | 109) |
| Ab_119706 | QLQLVESGGGLVQPGGSLRLSCAAS (SEQ | IGWFRQAPGKEREGVS |
| | ID NO: 103) | Y (SEQ ID NO: |
| | | 110) |
| Ab_119699 | QVQLVESGGGLVQPGGSLRLSCAAS (SEQ | MGYYRQISTKORNLVA |
| | ID NO: 102) | A (SEQ ID NO: |
| | | 111) |
| Ab_119702 | DVQLVESGGGLVQAGGSLRLSCAAS (SEQ | MSWHRQAPGKDRELVS |
| | ID NO: 104) | S (SEQ ID NO: |
| | | 112) |
| Ab_119704 | QLQLVESGGGLVQPGGSLRLSCAAS (SEQ | IGWFRQAPGKEREGVS |
| | ID NO: 103) | S (SEQ ID NO: |
| | | 113) |
| Ab_119707 | EVOLVESGGGSVQAGETLRLSCTAS (SEQ | MGWYRQAPGDECELVS |
| | ID NO: 105) | T (SEQ ID NO: |
| | | 114) |
| M1_C8 | QLQLVESGGGLVQPGGSLRLSCAAS (SEQ | IGWFRQAPGKEREGVS |
| | ID NO: 103) | S (SEQ ID NO: |
| | | 113) |
| M3_C3 | QLQLVESGGGLVQPGGSLRLSCAAS (SEQ | IGWFRQAPGKEREGVS |
| | ID NO: 103) | Y (SEQ ID NO: |
| | | 110) |
| Ab_119700 | QLQLVESGGGLVQPGGSLRLTCAAS (SEQ | IGWFRQAPGKEREGVS |
| | ID NO: 106) | S (SEQ ID NO: |
| | | 113) |
| M3_C6 | QVQLVESGGGLVQAGGSLRLSCAAS (SEQ | MGWFRQAPGKEREFVA |
| | ID NO: 107) | A (SEQ ID NO: |
| | | 115) |
| Ab_119696 | QVQLVESGGGLVQPGGSLRLSCAAS (SEQ | VAWYRQAPGEQREPVA |
| | ID NO: 102) | A (SEQ ID NO: |
| | | 109) |
| VHH Antibody | | |
| Name | FR3 | FR4 |
| M3_C7 | YYADSVKGRFTISGDNAKNSVYLQMNSLKPEDTA | WGQGTSVTVSS |
| | VYIC (SEQ ID NO: 116) | (SEQ ID NO: |
| | | 127) |
| Ab_113415 | IYADSVKGRFTISRDNAKNTVYLQMSSLKPEDTA | WGQGTSVTVS (SEQ |
| | VYYC (SEQ ID NO: 117) | ID NO: 128) |
| Ab_119706 | NYADSVKGRFTISRDNAKNTVYLQMNSLKPEDTG | WGQGTSVTVS (SEQ |
| | VYSC (SEQ ID NO: 118) | ID NO: 128) |
| Ab_119699 | YYADSVKGRFTISWDNANNTLFLQMNSLKSEDTA | WGQGTLVTVS (SEQ |
| | VYYC (SEQ ID NO: 119) | ID NO: 129) |
| Ab_119702 | HYADSVRGRFTISKGNARNTLYLQMNSLKPEDTA | WGQGTSVTVS (SEQ |
| | VYFC (SEQ ID NO: 120) | ID NO: 128) |
| Ab_119704 | NYADSVKGRFTVSRDNAKHTVYLQMNSLKPEDTA | MGQGTSVTVS (SEQ |
| | VYYC (SEQ ID NO: 121) | ID NO: 130) |
| Ab_119707 | NYADSVKGRFTISQDNAKNTVYLQMTSLKPEDTA | WGQGTLVTVS (SEQ |
| | IYSC (SEQ ID NO: 122) | ID NO: 129) |
| M1_C8 | NYADSVKGRFTVSRDNAKQTVYLQMNSLKPEDTA | MGQGTSVTVS (SEQ |
| | VYYC (SEQ ID NO: 123) | ID NO: 130) |
| M3_C3 | NYADTVKGRFTISRDNAKNTVYLQMNSLKPEDTG | WGQGTSVTVS (SEQ |
| | VYSC (SEQ ID NO: 124) | ID NO: 128) |
| Ab_119700 | NYADSVKGRFTVSRDNAKHTVYLQMNSLKPEDTA | MGQGTSVTVS (SEQ |
| | VYYC (SEQ ID NO: 121) | ID NO: 130) |
| M3_C6 | FYAASVKGRFTISRDTAKNSVYLQMNSLKPEDTA | WGQGTSVTVS (SEQ |
| | VYIC (SEQ ID NO: 125) | ID NO: 128) |
| Ab_119696 | IYADSVKGRFTISRDNAKNTVYLQMNSLKPEDTA | WGQGTSVTVS (SEQ |
| | VYYC (SEQ ID NO: 126) | ID NO: 128) |

[0134] In various embodiments, the FR1 of a VHH antibody of the disclosure contains the following amino acid sequence:
[0135] X₁X₂QLVESGGGX₃VQX₄GX₅X₆LRLX₇CX₈AS (SEQ ID NO: 20), wherein
   [0136] X₁ is E, D, or Q,
   [0137] X₂ is V or L,
   [0138] X₃ is L or S,
   [0139] X₄ is A or P,
   [0140] X₅ is E or G,
   [0141] X₆ is S or T,
   [0142] X₇ is S or T, and
   [0143] X₈ is A, T, or V.

[0144] In various embodiments, the FR2 of a VHH antibody of the disclosure contains the following amino acid sequence:
[0145] XₐX_{b}X₁₃X₁₄RQX₁₅X₁₆X₁₇X₁₈X₁₉X₂₀X₂₁X₂₂VX₂₃X_{c}, wherein
   [0146] Xₐ is I, M, or V,
   [0147] X_{b} is A, G, or S,
   [0148] X₁₃ is W or Y,
   [0149] X₁₄ is F, H, or Y,
   [0150] X₁₅ is A, I, or X,
   [0151] X₁₆ is P or S,
   [0152] X₁₇ is G or T,
   [0153] X₁₈ is D, K, or E,
   [0154] X₁₉ is D, E, or Q,
   [0155] X₂₀ is C or R,
   [0156] X₂₁ is E or N,
   [0157] X₂₂ is F, G, L, or P,
   [0158] X₂₃ is S or A, and
   [0159] Xₑ is A, S, T, or Y.

[0160] In various embodiments, the FR3 of a VHH antibody of the disclosure contains the following amino acid sequence:
[0161] X_{d}YAXₑX_{f}VX_{g}GRFTX₂₄SX₂₅X₂₆X₂₇AX₂₈X₂₉X₃₀X₃₁X₃₂LQMX₃₃SLKX₃₄EDT X₃₅X₃₆YX₃₇C (SEQ ID NO: 21), wherein
   [0162] X_{d} is F, H, I, N, or Y,
   [0163] Xₑ is A or D,
   [0164] X_{f} is S or T,
   [0165] X_{g} is K or R,
   [0166] X₂₄ is I or V,
   [0167] X₂₅ is G, K, R, Q, or W,
   [0168] X₂₆ is D or G,
   [0169] X₂₇ is N or T,
   [0170] X₂₈ is K, N, or R,
   [0171] X₂₉ is N, H, or Q,
   [0172] X₃₀ is T or S,
   [0173] X₃₁ is V or L,
   [0174] X₃₂ is F or Y,
   [0175] X₃₃ is N, S, or T,
   [0176] X₃₄ is P or S,
   [0177] X₃₅ is A or G,
   [0178] X₃₆ is I or V, and
   [0179] X₃₇ is F, I, S, or Y.

[0180] In various embodiments, the FR4 of a VHH antibody of the disclosure contains the following amino acid sequence:
[0181] X₄₀GQGTX₄₁VTVX₄₂X₄₃ (SEQ ID NO: 22), wherein
   [0182] X₄₀ is M or W,
   [0183] X₄₁ is L or S,
   [0184] X₄₂ is null or S, and
   [0185] X₄₃ is null or S.

[0186] The CDRs of the anti-mesothelin VHH polypeptides described herein may vary in amino acid sequence length. By way of nonlimiting example, CDR1 of the anti-mesothelin VHH polypeptides as described herein may comprise from about 5 to about 12 (e.g., 5 or 8) amino acid residues; CDR2 may comprise from about 7 to about 20 (e.g., 16, 17, or 8) amino acid residues; and CDR3 may comprise from about 5 to about 25 (e.g., 7-13, 15-24, or 16) amino acid residues. It will be appreciated by one skilled in the art that number of amino acids that constitute a CDR is not necessarily precise. In some cases, an amino acid residue, or 2 or 3 amino acid residues, at one end or both ends of a given CDR may be considered as part of the CDR or as part of the neighboring FR region. The CDR regions of representative anti-mesothelin VHH antibody polypeptides described herein are presented in Table 3A. The anti-mesothelin VHH antibodies described herein demonstrate the CDR diversity that is selected during affinity maturation of mesothelin binding polypeptides in the same animal. Despite such CDR diversity, the mesothelin binding VHHs generated as described herein show detectable binding to mesothelin. The anti-mesothelin VHH polypeptides demonstrate significant binding to the mesothelin antigen, despite some variation among the CDR sequences in the context of their framework regions.

[0187] In view of the representative anti-mesothelin VHH amino acid sequences listed in Table 1, it will be appreciated by one skilled in the art that individual VHH polypeptides, (e.g., of from about 105 to about 140 amino acids in length and comprising 3 CDRs and 4 FR regions), which comprise at least about or equal to 85%, or 88%, or greater identity in amino acid sequence bind to mesothelin antigen. In an embodiment, at least about or equal to 85%, 86%, 87%, 88%, 89%, 90%, 91%, 92%, 93%, 94%, 95%, 96%, 97%, 98%, 99%, or 100% amino acid sequence identity is tolerated among the anti-mesothelin VHHs without adversely affecting or eliminating binding of the VHH polypeptides to the mesothelin antigen. In an embodiment, such amino acid sequence variation among the anti-mesothelin VHH polypeptides is tolerated in the CDRs of the VHH polypeptides without adversely affecting binding of the VHHs to mesothelin. In a particular embodiment, the amino acid sequence variations between or among anti-mesothelin VHHs encompass one or more conservative amino acid substitutions or changes in a VHH amino acid sequence. In an embodiment, the one or more conservative amino acid substitutions or changes in a VHH amino acid sequence occur in one or more CDR sequences of the VHH, in one or more FR sequences of the VHH, or in CDR and FR sequences of the VHH.

[0188] The three CDRs of the anti-mesothelin VHH polypeptides are arranged or positioned in the context of four FR regions as follows: FR1-CDR1-FR2-CDR2-FR3-CDR3-FR4, in which FR1 to FR4 refer to the framework regions 1-4, respectively, and in which CDR1 to CDR3 refer to the complementarity determining regions 1-3, respectively. An alignment of anti-mesothelin VHHs, all of which specifically bind to mesothelin protein antigen, demonstrates the extensive similarities among the sequences of each of the FRs (FR1, FR2, FR3 and FR4) found in the different mesothelin-binding VHH polypeptides (FIG. 1). Similar to the FRs in conventional antibody polypeptides, the respective FRs (FR1, FR2, FR3 and FR4) of the anti-mesothelin VHH polypeptides described herein are highly similar in sequence among different mesothelin-binding VHHs that were generated. Accordingly, provided are anti-mesothelin VHH polypeptides comprising CDR1-3, in the structural context of FR1-4, that bind to mesothelin protein, or to suitable fragments of the mesothelin protein, as well as polypeptides that comprise or consist essentially of one or more of the anti-mesothelin VHHs and/or mesothelin binding fragments thereof (e.g., a chimeric antigen receptor (CAR) polypeptide).

[0189] In addition, the FRs of the mesothelin-binding VHHs described herein are highly or essentially similar in sequence to the FRs of VHHs produced in camelid animals, such as alpacas, camels, llamas, and the like. As they provide structural and conformational support for the CDRs of VHH polypeptides, the FRs and the FR1, FR2, FR3 and FR4 regions among camelid VHH polypeptides generally share significant sequence identity. See, e.g., A. M. Vattekatte et al., March, 2020, Peer J., 6(8):e8408. DOI: 10.7717/peerj.8408 and L. S. Mitchell and L. J. Colwell, 2018, Proteins, 86(7): 697-706).

[0190] Table 3B presents the amino acid sequences of the four framework regions, i.e., FR1, FR2, FR3 and FR4, respectively, of representative anti-mesothelin VHH polypeptides described herein; and FIG. 1 presents a multiple sequence alignment of the amino acid sequences of the VHH polypeptides with CDR regions highlighted in grey. The alignment of the sequences supports substantial similarity among the structural FRs of the anti-mesothelin camelid VHH antibodies described herein.

[0191] In embodiments, in cases in which a FR (or CDR) amino acid residue in a VHH polypeptide may be one of several alternative amino acid residues, the alternative amino acid residues will frequently share similar characteristics or properties, e.g., hydrophobicity, polarity, and/or charge. A conservative replacement (also called a conservative substitution) is an amino acid replacement or substitution in a polypeptide or region thereof that changes a given amino acid residue to a different amino acid residue with similar biochemical properties, such as charge, hydrophobicity, and/or size. By way of non-limiting example, the below Table 4 presents amino acids and their 1-letter codes categorized into six main classes based on their structure and the general chemical characteristics of their side chains (R groups).

TABLE 4
Classes of amino acids based on structural and
chemical characteristics of their side chains.

| Amino Acids | Class |
|---|---|
| Glycine (G), Alanine (A), Valine (V), Leucine | Aliphatic |
| (L), Isoleucine (I) | |
| Serine (S), Cysteine I, Selenocysteine (U), | Hydroxyl or sulfur/selenium |
| Threonine (T), Methionine (M) | containing |
| Proline (P) | Cyclic |
| Phenylalanine (F), Tyrosine (Y), Tryptophan | Aromatic |
| (W) | |
| Histidine (H), Lysine (K), Arginine (R) | Basic |
| Aspartate (D), Glutamate (E), Asparagine (N), | Acidic and amides thereof |
| Glutamine (Q) | |

In embodiments, an amino acid within an FR or CDR of a VHH antibody of the disclosure is substituted with another amino acid from the same class indicated in Table 4.

[0192] In an embodiment, amino acid sequence substitutions or changes in an anti-mesothelin VHH polypeptide relative to another anti-mesothelin VHH polypeptide comprise conservative amino acid substitutions or changes such that a given amino acid residue is substituted with or replaced by a different amino acid residue with similar biochemical properties, such as charge, hydrophobicity, and/or size. In an embodiment, sequence variation between or among anti-mesothelin VHH polypeptides results from one or more conservative amino acid changes and account for the percent sequence variation, e.g., 85%, 86%, 87%, 88%, 90%, 91%, 92%, 93%, 94%, 95%, 96%, 97%, 98%, or 99% sequence variation.

[0193] In some embodiments, the VHHs as described herein are humanized using methods and techniques practiced by those having skill in the art. (See, e.g., U.S. Pat. Nos. 8,975,382 and 10,550,174, the contents of which are incorporated by reference herein).

[0194] The anti-mesothelin VHH antibodies described herein have widespread application (e.g., as antigen binding domains of chimeric antigen receptor polypeptides). In embodiments, the disclosure provides polynucleotides that encode operably linked modular components that constitute the described anti-mesothelin VHHs. In embodiments, the anti-mesothelin VHHs are recombinantly produced. In embodiments, the anti-mesothelin VHHs encompass the proteins (polypeptides) encoded by the polynucleotides. In embodiments, the polynucleotide is DNA, cDNA, RNA, mRNA, or the like. In an embodiment, the anti-mesothelin VHHs may be humanized or codon-optimized using methods practiced by those having skill in the art.

[0195] Suitable methods of producing or isolating antibody fragments having the requisite binding specificity and affinity for binding to an epitope tag include for example, methods which select recombinant antibody from a library or by PCR (e.g., U.S. Pat. No. 5,455,030 and U.S. Pat. No. 7,745,587 each of which is incorporated by reference herein in its entirety).

[0196] Functional fragments of antibodies, including fragments of chimeric, humanized, primatized, veneered, or single chain antibodies, can also be produced. Functional fragments or portions of the foregoing antibodies include those which are reactive with the mesothelin protein. For example, antibody fragments capable of binding to mesothelin or a portion thereof, include, but not limited to, scFvs, Fabs, VHHs, Fv, Fab, ‘ab’ and F‘ab’)₂. Such fragments can be produced by enzymatic cleavage or by recombinant techniques. For instance, papain or pepsin cleavage are used generate Fab or F‘ab’)₂ antibody fragments, respectively. Antibody fragments are produced in a variety of truncated forms using antibody-encoding genes in which one or more stop codons has been introduced upstream of the natural stop site. For example, a chimeric gene encoding a F‘ab’)₂ heavy chain peptide portion can be designed to include DNA sequences encoding the CH₁ peptide domain and hinge region of an immunoglobulin heavy chain.

### Epitope Tags

[0197] In certain embodiments, an anti-mesothelin VHH antibody includes a single epitope tag (single tag sequence) or multiple tags (multiple tag sequences), to which anti-tag antibodies specifically bind. Such epitope tags, which are specifically bindable by the anti-epitope tag antibodies, are useful in detecting VHHs bound to mesothelin protein antigen. The epitope tags may be placed at the amino terminus, carboxy terminus, or internally within a VHH molecule. Such tags and/or anti-tag antibodies are described for example, in (U.S. Pat. Nos. 8,349,326; 9,023,352, WO 2019/094095A1) and U.S. Pat. Nos. 7,943,345; 8,114,634 and 8,865,871), the contents of which are incorporated herein by reference in their entireties. By way of illustrative example, peroxidase labeled antibodies that bind the anti-O-tag antibody may be used to detect these anti-tag antibodies in assays in which samples are incubated with goat anti-O-tag-HRP conjugated antibody (Bethyl labs) diluted 1:5000 in blocking solution for 1 hour at RT with rocking and were washed as above before adding TMB microwell peroxidase substrate (KPL) to develop (incubated for 10-40 min). Development was stopped with 1M H₂SO₄ and the plates were read at 450 nm on an ELx808 Ultra Microplate Reader (Bio-Tek instruments), (Mukherjee, J. et al., 2012, PloS ONE 7:e29941).

[0198] Chimeric Antigen Receptors (CAR) and CAR-T Cells The disclosure provides immune cells that express chimeric antigen receptors (CARs) containing anti-mesothelin VHH domains (e.g., M3_C7, Ab_113415, Ab_119706, Ab 119699, Ab 119702, Ab 119704, Ab_119707, M1_C8, M3_C3, Ab_119700, M3_C6, or Ab_119696) as antigen binding domains. Non-limiting examples of CARs include those described in Larson and Maus, “Recent advances and discoveries in the mechanisms and functions of CAR-T cells,” Nature Reviews Cancer, 21:145-161 (2021), the disclosure of which is incorporated herein by reference in its entirety for all purposes. Modification of immune cells to express a chimeric antigen receptor can enhance an immune cell's immunoreactive activity. In embodiments, the chimeric antigen receptor has an affinity for an epitope on mesothelin. In some cases, the antigen is associated with an altered fitness of an organism. For example, the chimeric antigen receptor can have an affinity for an epitope mesothelin expressed in a neoplastic cell. Because the CAR-T cells can act independently of major histocompatibility complex (MHC), activated CAR-T cells can kill the neoplastic cell expressing the antigen.

[0199] Some embodiments of the methods provided herein involve autologous immune cell immunotherapy, wherein immune cells are obtained from a subject having a disease or altered fitness characterized by cancerous or otherwise altered cells expressing a surface marker. The obtained immune cells are genetically modified to express a chimeric antigen receptor and are effectively redirected against specific antigens. Thus, in some embodiments, immune cells are obtained from a subject in need of CAR-T immunotherapy. In some embodiments, these autologous immune cells are cultured and modified shortly after they are obtained from the subject. In other embodiments, the autologous cells are obtained and then stored for future use. This practice may be advisable for individuals who may be undergoing parallel treatment that will diminish immune cell counts in the future. In allogeneic immune cell immunotherapy, immune cells can be obtained from a donor other than the subject who will be receiving treatment. In some embodiments, immune cells are obtained from a healthy subject or donor and are genetically modified to express a chimeric antigen receptor and are effectively redirected against specific antigens. The immune cells, after modification to express a chimeric antigen receptor, are administered to a subject for treating a neoplasia (e.g., a cancer). In some embodiments, immune cells to be modified to express a chimeric antigen receptor can be obtained from pre-existing stock cultures of immune cells.

[0200] Immune cells and/or immune effector cells can be isolated or purified from a sample collected from a subject or a donor using standard techniques known in the art. For example, immune effector cells can be isolated or purified from a whole blood sample by lysing red blood cells and removing peripheral mononuclear blood cells by centrifugation. The immune effector cells can be further isolated or purified using a selective purification method that isolates the immune effector cells based on cell-specific markers such as CD25, CD3, CD4, CD8, CD28, CD45RA, or CD45RO. In one embodiment, CD4⁺ is used as a marker to select T cells. In one embodiment, CD8⁺ is used as a marker to select T cells. In one embodiment, CD4⁺ and CD8⁺ are used as a marker to select regulatory T cells.

[0201] One technique for isolating or purifying immune effector cells is flow cytometry. In fluorescence activated cell sorting a fluorescently labelled antibody with affinity for an immune effector cell marker is used to label immune effector cells in a sample. A gating strategy appropriate for the cells expressing the marker is used to segregate the cells. For example, T lymphocytes can be separated from other cells in a sample by using, for example, a fluorescently labeled antibody specific for an immune effector cell marker (e.g., CD4, CD8, CD28, CD45) and corresponding gating strategy. In one embodiment, a CD4 gating strategy is employed. In one embodiment, a CD8 gating strategy is employed. In one embodiment, a CD4 and CD8 gating strategy is employed. In some embodiments, a gating strategy for other markers specific to an immune effector cell is employed instead of, or in combination with, the CD4 and/or CD8 gating strategy.

[0202] The immune effector cells contemplated in the disclosure are effector T cells or NK cells. In some embodiments, the effector T cell is a naïve CD8⁺ T cell, a cytotoxic T cell, a natural killer T (NKT) cell, a natural killer cell, a gammadelta T cell (γδ cell), or a regulatory T (Treg) cell. In some embodiments, the effector T cells are thymocytes, immature T lymphocytes, mature T lymphocytes, resting T lymphocytes, or activated T lymphocytes. In some embodiments the immune effector cell is a CD4⁺ CD8⁺ T cell or a CD4⁻ CD8⁻ T cell. In some embodiments the immune effector cell is a T helper cell. In some embodiments the T helper cell is a T helper 1 (Th1), a T helper 2 (Th2) cell, or a helper T cell expressing CD4 (CD4+ T cell). In some embodiments, the immune effector cell is any other subset of T cells.

[0203] Chimeric antigen receptors (CARs) as contemplated in the present disclosure comprise an extracellular binding domain (e.g., a VHH domain), a transmembrane domain (e.g., a transmembrane domain derived from a CD28, CD8, or CD3 polypeptide), and an intracellular domain (e.g., an intracellular domain containing a CD3ζ signaling domain, and/or a co-stimulation domain derived from a CD28, 41BB, OX40, or CD27 polypeptide). Binding of an antigen to the extracellular binding domain can activate the CAR-T cell and generate an effector response, which includes CAR-T cell proliferation, cytokine production, and other processes that lead to the death of the antigen expressing cell. In some embodiments of the present disclosure, the chimeric antigen receptor further comprises a linker (e.g., a hinge domain derived from a CD8 CD28, CD4, or IgG polypeptide). In some cases, the CAR comprises a signal peptide, such as a signal peptide derived from a CD28 or GCSF signal peptide.

[0204] In various embodiments, the CAR specifically binds any antigen that can be targeted by a chimeric antigen receptor (CAR), such as mesothelin. Further non-limiting examples of antigens that can be bound by a CAR of the present disclosure include those described in Xu, et al. “The development of CAR design for tumor CAR-T cell therapy,” Oncotarget, 9(17) doi: 10.18632/oncotarget.24179, the disclosure of which is incorporated herein by reference in its entirety for all purposes.

[0205] Chimeric antigen receptors, or any polypeptide of the present disclosure, can be delivered to an immune cell using a polynucleotide encoding the chimeric antigen receptor or polypeptide. For example, immune cells obtained from a subject may be transduced with a nucleic acid vector encoding the chimeric antigen receptor. The vector may then be used to transduce recipient immune cells so that these cells will then express the chimeric antigen receptor. Efficient means of transducing immune cells include transfection and transduction. Such methods are well known in the art. For example, applicable methods for delivery the nucleic acid molecule encoding the chimeric antigen receptor (and the nucleic acid(s) encoding the base editor) can be found in International Application No. PCT/US2009/040040 and U.S. Pat. Nos. 8,450,112; 9,132,153; and 9,669,058, each of which is incorporated herein in its entirety. Additionally, those methods and vectors described herein for delivering the nucleic acid encoding the base editor are applicable to delivering the nucleic acid encoding the chimeric antigen receptor.

### Extracellular Binding Domain

[0206] The chimeric antigen receptors of the disclosure include an extracellular binding domain (e.g., an anti-mesothelin VHH domain, such as M3_C7, Ab_113415, Ab_119706, Ab 119699, Ab 119702, Ab 119704, Ab_119707, M1_C8, M3_C3, Ab_119700, M3_C6, and Ab_119696). The extracellular binding domain of a chimeric antigen receptor contemplated herein comprises an amino acid sequence of an antibody (e.g., a VHH antibody), or an antigen binding fragment thereof, that has an affinity for mesothelin.

[0207] In some embodiments the chimeric antigen receptor contains an amino acid sequence of an antibody (e.g., a VHH antibody such as M3_C7, Ab_113415, Ab_119706, Ab_119699, Ab 119702, Ab 119704, Ab_119707, M1_C8, M3_C3, Ab 119700, M3_C6, and Ab_119696). In some embodiments, the chimeric antigen receptor contains the amino acid sequence of an antigen binding fragment of an antibody. The antibody (or fragment thereof) portion of the extracellular binding domain recognizes and binds to an epitope of mesothelin. In some embodiments, the antibody fragment portion of a chimeric antigen receptor is a VHH domain. In other embodiments, the antibody fragment portion of a chimeric antigen receptor is a multichain variable fragment, which can comprise more than one extracellular binding domains and therefore bind to more than one antigen simultaneously. In a multiple chain variable fragment embodiment, a hinge region may separate the different variable fragments, providing necessary spatial arrangement and flexibility.

[0208] In embodiments, the antigen-binding portion of a chimeric antigen receptor comprises complementarity determining regions (e.g., CDR1, CDR2, and CDR3 regions) that are responsible for the antibody's affinity for a particular antigen. Thus, antibodies that recognize different antigens comprise different complementarity determining regions.

[0209] In some embodiments, the antigen recognized and bound by the extracellular domain is a protein or peptide, a nucleic acid, a lipid, or a polysaccharide. Antigens can be heterologous, such as those expressed in a pathogenic bacteria or virus. Antigens can also be synthetic; for example, some individuals have extreme allergies to synthetic latex and exposure to this antigen can result in an extreme immune reaction. In some embodiments, the antigen is autologous, and is expressed on a diseased or otherwise altered cell. For example, in some embodiments, the antigen is expressed in a neoplastic cell.

### Transmembrane Domain

[0210] The chimeric antigen receptors of the disclosure include a transmembrane domain. The transmembrane domain of the chimeric antigen receptors described herein spans the CAR-T cell's or CAR NT cell's lipid bilayer cellular membrane and separates the extracellular binding domain and the intracellular signaling domain. In some embodiments, this domain is derived from other receptors having a transmembrane domain, while in other embodiments, this domain is synthetic. In some embodiments, the transmembrane domain may be derived from a non-human transmembrane domain and, in some embodiments, humanized. By “humanized” is meant having the sequence of the nucleic acid encoding the transmembrane domain optimized such that it is more reliably or efficiently expressed in a human subject. In some embodiments, the transmembrane domain is derived from another transmembrane protein expressed in a human immune effector cell.

### Intracellular Signaling Domain

[0211] The chimeric antigen receptors of the disclosure include an intracellular signaling domain. The intracellular signaling domain is the intracellular portion of a protein expressed in a T cell or NK cell that transduces an effector function signal (e.g., an activation signal) and directs the effector cell to perform a specialized function. Effector cell activation can be induced by a number of factors, including binding of cognate antigen to the chimeric antigen receptor on the surface of effector cell and/or binding of cognate ligand to costimulatory molecules on the surface of the cell. An effector cell co-stimulatory molecule is a cognate binding partner on an immune effector cell that specifically binds with a co-stimulatory ligand, thereby mediating a co-stimulatory response by the effector cell, such as, but not limited to, proliferation. Co-stimulatory molecules include, but are not limited to, an MHC class I molecule. Activation of an effector cell leads to immune response, Such as effector cell proliferation and differentiation (see, e.g., Smith-Garvin et al., Annu. Rev. Immunol., 27:591-619, 2009). Exemplary effector cell (e.g., T cells) signaling domains are known in the art.

[0212] The intracellular signaling domain of the chimeric antigen receptor contemplated herein comprises a primary signaling domain. In some embodiments, the chimeric antigen receptor comprises the primary signaling domain and a secondary, or co-stimulatory, signaling domain.

### Polynucleotides and Vectors

[0213] In some cases, more than one anti-mesothelin-binding VHH antibody (i.e., anti-mesothelin VHH) is coupled or linked (e.g., covalently linked) to other sequences, e.g., a leader amino acid sequence, domains of a chimeric antigen receptor, one or more spacer or linker (flexible spacer or linker) amino acid sequences, or one or more epitope tag amino acid sequences. In an embodiment, a polynucleotide molecule, such as a recombinant or isolated polynucleotide molecule, encodes a polypeptide containing an anti-mesothelin VHH polypeptide (e.g., a VHH antibody or a chimeric antigen receptor). In an embodiment, the polynucleotide encodes a fragment or portion of the anti-mesothelin VHH, where the fragment or portion maintains mesothelin binding activity. The polynucleotide sequences encoding representative anti-mesothelin VHH antibodies as described herein are set forth in Table 2.

[0214] In an embodiment, an anti-mesothelin VHH can be humanized, i.e., modified to increase its similarity to antibodies or antibody variants produced naturally in humans, using techniques known and practiced in the art. Briefly and by way of nonlimiting example, a humanized antibody can be generated by inserting the appropriate CDR coding sequences (e.g‘, ‘do’ or’ sequences that are responsible for the desired binding properties) into a human antibo”y “scaff”ld” (e.g‘, ‘accep’ or’ sequences) comprising essentially invariant framework region (FR) sequences (FRs). In embodiments, the CDRs of the anti-mesothelin VHH antibodies described herein may be inserted into FRs, which provide the structural scaffold that allows the CDRs to bind to mesothelin. Recombinant DNA methods using an appropriate vector and expression in mammalian cells are employed and routinely practiced in the art to achieve the production of recombinant humanized antibodies.

[0215] In an embodiment, the polynucleotide encodes a mesothelin-binding VHH molecule having binding function, or a functional binding portion thereof. In embodiments, antibody fragments, microproteins, darpins, anticalins, peptide mimetic molecules, aptamers, synthetic molecules, etc. can be linked to the anti-mesothelin VHH binding molecule.

[0216] In an embodiment, an anti-mesothelin VHH can be modified, for example, by attachment (e.g., either directly or indirectly via a linker or spacer) to another agent (e.g., a detectable label, a cytotoxic drug, and/or another polypeptide). Accordingly, a polynucleotide (e.g., DNA) that encodes one anti mesothelin VHH is joined (in reading frame) with a polynucleotide encoding a second polypeptide, and so on. In certain embodiments, additional amino acids are encoded within the polynucleotide between the anti-mesothelin VHH and other polypeptides so as to produce an unstructured region (e.g., a flexible spacer) that separates the anti-mesothelin VHH from the other polypeptides to better promote independent folding of each polypeptide into its active or functional conformation or shape. Commercially available techniques for fusing proteins (or their encoding polynucleotides) may be employed to recombinantly join or couple polypeptide sequences to one another.

[0217] The compositions and methods described herein in various embodiments include an isolated polynucleotide sequence or an isolated polynucleotide molecule that encodes a polypeptide (e.g., anti-mesothelin VHH or a chimeric antigen receptor containing an anti-mesothelin VHH domain of the disclosure). Accordingly, in some embodiments, the isolated polynucleotide sequence or isolated polynucleotide molecule comprises or consists of a polynucleotide sequence that encodes a polypeptide molecule (anti-mesothelin VHH) having an amino acid sequence listed in Table 1, or a functional portion thereof, as described herein. In some embodiments, the isolated polynucleotide sequence or isolated polynucleotide molecule comprises or consists of a polynucleotide sequence listed in Table 2. In an embodiment, a composition comprises a combination of the isolated polynucleotide sequences or isolated polynucleotide molecules.

[0218] Also encompassed by the present disclosure are polynucleotide sequences, DNA or RNA, which are substantially complementary to the DNA sequences encoding the polypeptides described herein, and which specifically hybridize with these DNA sequences under conditions of stringency known to those of skill in the art. As referred to herein, substantially complementary means that the nucleotide sequence of the polynucleotide need not reflect the exact sequence of the original encoding sequences, but must be sufficiently similar in sequence to permit hybridization with a nucleic acid sequence under high stringency conditions. For example, non-complementary bases can be interspersed in a nucleotide sequence, or the sequences can be longer or shorter than the polynucleotide sequence, provided that the sequence has a sufficient number of bases complementary to the sequence to allow hybridization thereto. Conditions for stringency are described, e.g., in Ausubel, F. M., et al., Current Protocols in Molecular Biology, (Current Protocol, 1994), and Brown, et al., Nature, 366:575 (1993); and further defined in conjunction with certain assays.

[0219] Vectors and plasmids containing one or more of the polynucleotide molecules encoding the anti-mesothelin VHH amino acid sequences of Table 1, or a functional portion thereof, are provided. Vectors and plasmids containing one or more of the polynucleotide molecules of Table 2 are also provided. Suitable vectors for use in eukaryotic and prokaryotic cells are known in the art and are commercially available or readily prepared by the skilled practitioner in the art. Additional vectors can also be found, for example, in Ausubel, F. M., et al., Ibid. and in Sambrook et al”, “Molecular Cloning: A Laboratory Manu“1,” 2nd ED. (1989), and other editions.

[0220] Uses of plasmids, vectors or viruses (viral vectors) containing polynucleotides encoding the anti-mesothelin VHHs as described herein include generation of mRNA or protein in vitro or in vivo. In related embodiments, host cells transformed with the plasmids, vectors, or virus vectors are provided, as described above. Nucleic acid molecules can be inserted into a construct (such as a prokaryotic expression plasmid, a eukaryotic expression vector, or a viral vector construct, which can, optionally, replicate and/or integrate into a recombinant host cell by known methods. The host cell can be a eukaryote or prokaryote and can include, for example and without limitation, yeast (such as Pichia pastoris or Saccharomyces cerevisiae), bacteria (such as E. coli, or Bacillus subtilis), animal cells or tissue (CHO or COS cells), insect Sf9 cells (such as baculoviruses infected SF9 cells), or mammalian cells (somatic or embryonic cells, Human Embryonic Kidney (HEK) cells, Chinese hamster ovary (CHO) cells, HeLa cells, human 293 cells (Expi293F), and monkey COS-7 cells). Suitable host cells also include a mammalian cell, a bacterial cell, a yeast cell, an insect cell, a plant cell, or an algal cell.

[0221] In another aspect, an RNA polynucleotide, in particular, mRNA, encodes a polypeptide as described herein. mRNA encoding the polypeptides may contain a 5′ cap structure, a 5′ UTR, an open reading frame, a 3′ UTR and poly-A sequence followed by a C30 stretch and a histone stem loop sequence (Thess, A. et al., 2015, Mol Ther, 23(9):1456-1464; Thran, M. et al., 2017, EMBO Molecular Medicine, DOI: 10.15252/emmm.201707678). Sequences may be codon-optimized for human use using techniques and protocols known and used by those skilled in the art. In an embodiment, the mRNA sequences do not include chemically modified bases. mRNAs encoding the anti-mesothelin VHHs thereof as described herein may be capped enzymatically or further polyadenylated for in vivo studies/use. In an embodiment, a polypeptide of the disclosure is encoded by a mRNA molecule. In an embodiment, the mRNA may be delivered to or introduced into a cell.

[0222] Expression of proteins, which normally have a shortened serum half-life, by encoding mRNA, particularly sequence optimized, unmodified mRNA, advantageously prolongs the bioavailability of these proteins for in vivo activity. (see, e.g., K. Kariko et al, 2012, Mol. Ther., 20:948-953; Thess, A. et al., 2015, Mol Ther, 23(9):1456-1464;).

### Recombinant Polypeptide Expression

[0223] In general, polypeptides of the disclosure (e.g., VHH antibodies) may be produced by transformation of a suitable host cell with all or part of a polypeptide-encoding nucleic acid molecule or fragment thereof in a suitable expression vehicle.

[0224] Those skilled in the field of molecular biology will understand that any of a wide variety of systems may be used to express a recombinant protein. The precise host cell used is not critical to the various aspects and embodiments of the disclosure. A polypeptide of the disclosure may be produced in a prokaryotic host (e.g., E. coli) or in a eukaryotic host (e.g., an immune cell, such an immune effector cell (e.g., a T cell) Saccharomyces cerevisiae, insect cells, e.g., Sf21 cells, or mammalian cells, e.g., NIH 3T3, HeLa, or COS cells). Such cells are available from a wide range of sources (e.g., the American Type Culture Collection, Rockland, Md.; also, see, e.g., Ausubel et al., supra). The method of transformation or transfection and the choice of expression vehicle will depend on the host system selected. Transformation and transfection methods are described, e.g., in Ausubel et al. (supra); expression vehicles may be chosen from those provided, e.g., in Cloning Vectors: A Laboratory Manual (P. H. Pouwels et al., 1985, Supp. 1987).

[0225] A variety of expression systems exist for the production of the polypeptides (e.g., VHH antibodies or chimeric antigen receptors) of the disclosure. Expression vectors useful for producing such polypeptides include, without limitation, chromosomal, episomal, and virus-derived vectors, e.g., vectors derived from bacterial plasmids, from bacteriophage, from transposons, from yeast episomes, from insertion elements, from yeast chromosomal elements, from viruses such as baculoviruses, papova viruses, such as SV40, vaccinia viruses, adenoviruses, fowl pox viruses, pseudorabies viruses and retroviruses, and vectors derived from combinations thereof.

[0226] One particular bacterial expression system for polypeptide production is the E. coli pET expression system (Novagen, Inc., Madison, Wis). According to this expression system, DNA encoding a polypeptide is inserted into a pET vector in an orientation designed to allow expression. Since the gene encoding such a polypeptide is under the control of the T7 regulatory signals, expression of the polypeptide is achieved by inducing the expression of T7 RNA polymerase in the host cell. This is typically achieved using host strains that express T7 RNA polymerase in response to IPTG induction. Once produced, recombinant polypeptide is then isolated according to standard methods known in the art, for example, those described herein.

[0227] Another bacterial expression system for polypeptide production is the pGEX expression system (Pharmacia). This system employs a GST gene fusion system that is designed for high-level expression of genes or gene fragments as fusion proteins with rapid purification and recovery of functional gene products. The protein of interest is fused to the carboxyl terminus of the glutathione S-transferase protein from Schistosoma japonicum and is readily purified from bacterial lysates by affinity chromatography using Glutathione Sepharose 4B. Fusion proteins can be recovered under mild conditions by elution with glutathione. Cleavage of the glutathione S-transferase domain from the fusion protein is facilitated by the presence of recognition sites for site-specific proteases upstream of this domain. For example, proteins expressed in pGEX-2T plasmids may be cleaved with thrombin; those expressed in pGEX-3X may be cleaved with factor Xa.

[0228] Once the recombinant polypeptide of the disclosure is expressed, it can be isolated, e.g., using affinity chromatography. In one example, an antibody (e.g., produced as described herein) raised against an antigen of the disclosure may be attached to a column and used to isolate the recombinant polypeptide. Lysis and fractionation of polypeptide-harboring cells prior to affinity chromatography may be performed by standard methods.

[0229] Once isolated, a recombinant protein can, if desired, be further purified, e.g., by high performance liquid chromatography (see, e.g., Fisher, Laboratory Techniques In Biochemistry and Molecular Biology, eds., Work and Burdon, Elsevier, 1980). Polypeptides of the disclosure, particularly short peptide fragments, can also be produced by chemical synthesis (e.g., by the methods described in Solid Phase Peptide Synthesis' 2nd ed., 1984 The Pierce Chemical Co., Rockford, Ill.). These general techniques of polypeptide expression and purification can also be used to produce and isolate useful peptide fragments or analogs (described herein).

### Compositions

[0230] Provided also are compositions (e.g., pharmaceutical compositions) for use in the methods of the disclosure. In embodiments, the composition is a pharmaceutical composition for use in treating a disease or disorder (e.g., a neoplasia). In some instances, a composition of the disclosure is used in a diagnostic method (e.g., to detect a marker associated with a disease). In some cases, a composition of the disclosure is used in one of the screening methods provided herein. In an embodiment, the compositions contain a cell, polynucleotide, vector, or polypeptide (e.g., a VHH antibody) provided herein. In some cases, the composition contains CAR-T cells or CAR NK cells, as described herein and an acceptable carrier, excipient, or diluent.

[0231] The agents of the disclosure (e.g., polynucleotides, polypeptides, vectors, and/or cells) may be contained in any appropriate amount in any suitable carrier substance and is/are present in some cases in an amount of 0.01-95% by weight of the total weight of the composition. A pharmaceutical composition may be provided in a form that is suitable for a parenteral (e.g., subcutaneous, intravenous, intramuscular, or intraperitoneal) administration route, such that the agent, such as a vector or cell described herein, is systemically delivered.

[0232] The compositions of the present disclosure can be prepared in accordance with known techniques. See, e.g., Remington, The Science And Practice of Pharmacy (21st ed. 2005). In some embodiments, an agent of the disclosure is present in a reconstitutable dry composition (e.g., a lyophilized composition or powder). In embodiments, an agent is admixed with a suitable carrier prior to administration or storage, and in some embodiments, the composition further comprises an acceptable carrier (e.g., a pharmaceutically acceptable carrier). Suitable pharmaceutically acceptable carriers generally comprise inert substances that aid in administering the pharmaceutical composition to a subject, aid in processing the pharmaceutical compositions into deliverable preparations, or aid in storing the pharmaceutical composition prior to administration. Carriers can include agents that can stabilize, optimize or otherwise alter the form, consistency, viscosity, pH, pharmacokinetics, or solubility of a composition. Such agents include buffering agents, wetting agents, emulsifying agents, diluents, encapsulating agents, and skin penetration enhancers. For example, carriers can include, but are not limited to, saline, buffered saline, dextrose, arginine, sucrose, water, glycerol, ethanol, sorbitol, dextran, sodium carboxymethyl cellulose, and combinations thereof.

[0233] Some nonlimiting examples of materials which can serve as carriers include: (1) sugars, such as lactose, glucose and sucrose; (2) starches, such as corn starch and potato starch; (3) cellulose, and its derivatives, such as sodium carboxymethyl cellulose, methylcellulose, ethyl cellulose, microcrystalline cellulose and cellulose acetate; (4) powdered tragacanth; (5) malt; (6) gelatin; (7) lubricating agents, such as magnesium stearate, sodium lauryl sulfate and talc; (8) excipients, such as cocoa butter and suppository waxes; (9) oils, such as peanut oil, cottonseed oil, safflower oil, sesame oil, olive oil, corn oil and soybean oil; (10) glycols, such as propylene glycol; (11) polyols, such as glycerin, sorbitol, mannitol and polyethylene glycol (PEG); (12) esters, such as ethyl oleate and ethyl laurate; (13) agar; (14) buffering agents, such as magnesium hydroxide and aluminum hydroxide; (15) alginic acid; (16) pyrogen-free water; (17) isotonic saline; (18) Rin'er's solution; (19) ethyl alcohol; (20) pH buffered solutions; (21) polyesters, polycarbonates and/or polyanhydrides; (22) bulking agents, such as polypeptides and amino acids (23) serum alcohols, such as ethanol; and (23) other non-toxic compatible substances employed in pharmaceutical formulations. Wetting agents, coloring agents, release agents, coating agents, sweetening agents, flavoring agents, perfuming agents, preservative and antioxidants can also be present in the formulation.

[0234] Compositions of the disclosure can contain one or more pH buffering compounds to maintain the pH of the formulation at a predetermined level that reflects physiological pH, such as in the range of about 5.0 to about 8.0. The pH buffering compound used in the aqueous liquid formulation can be an amino acid or mixture of amino acids, such as histidine or a mixture of amino acids such as histidine and glycine. Alternatively, the pH buffering compound is an agent which maintains the pH of the formulation at a predetermined level, such as in the range of about 5.0 to about 8.0, and which does not chelate calcium ions. Illustrative examples of such pH buffering compounds include, but are not limited to, imidazole and acetate ions. The pH buffering compound may be present in any amount suitable to maintain the pH of the formulation at a predetermined level.

[0235] Compositions can also contain one or more osmotic modulating agents, i.e., a compound that modulates the osmotic properties (e.g., tonicity, osmolality, and/or osmotic pressure) of the formulation to a level that is acceptable, for example, to the blood stream and blood cells of recipient subjects. The osmotic modulating agent can be an agent that does not chelate calcium ions. The osmotic modulating agent can be any compound known or available to those skilled in the art that modulates the osmotic properties of the formulation. One skilled in the art may empirically determine the suitability of a given osmotic modulating agent for use in the inventive formulation. Illustrative examples of suitable types of osmotic modulating agents include, but are not limited to: salts, such as sodium chloride and sodium acetate; sugars, such as sucro69uspensiose, and mannitol; amino acids, such as glycine; and mixtures of one or more of these agents and/or types of agents. The osmotic modulating agent(s) may be present in any concentration sufficient to modulate the osmotic properties of the formulation.

[0236] The skilled artisan can readily determine the number of cells and amount of optional additives, vehicles, and/or carriers in compositions and to be administered in methods of the disclosure. Of course, for any composition to be administered to an animal or human, and for any particular method of administration, it is advantageous to determine therefore: toxicity, such as by determining the lethal dose (LD) and LD50 in a suitable animal model (e.g., a rodent such as a mouse); and, the dosage of the composition(s), concentration of components therein, and the timing of administering the composition(s), which elicit a suitable response. Such determinations do not require undue experimentation from the knowledge of the skilled artisan, this disclosure and the documents cited herein, and the time for sequential administrations can be ascertained without undue experimentation.

[0237] In some embodiments, the composition is formulated for delivery to a subject. Suitable routes of administrating the pharmaceutical composition described herein include, without limitation: topical, subcutaneous, transdermal, intradermal, intralesional, intraarticular, intraperitoneal, intravesical, transmucosal, gingival, intradental, intracochlear, transtympanic, intraorgan, epidural, intrathecal, intramuscular, intravenous, intravascular, intraosseus, periocular, intratumoral, intracerebral, and intracerebroventricular administration. The pharmaceutical composition may be administered systemically.

[0238] The composition may be in the form of a solutio70uspensionsion, an emulsion, an infusion device, or a delivery device for implantation, or it may be presented as a dry powder to be reconstituted with water or another suitable vehicle before use. Apart from the agent (e.g., CAR-T cells, CAR NK cells, VHH antibodies, polynucleotides, or polypeptides provided herein), the composition may include suitable parenterally acceptable carriers and/or excipients. The active therapeutic agent(s) may be incorporated into microspheres, microcapsules, nanoparticles, liposomes, or the like for controlled release. Furthermore, the composition may include suspending, solubilizing, stabilizing, pH-adjusting agents, tonicity adjusting agents, and/or dispersing, agents.

[0239] In some embodiments, the composition is formulated for intravenous delivery. The compositions according to the described embodiments may be in a form suitable for sterile injection. To prepare such a composition, the suitable therapeutic(s) are dissolved or suspended in a parenterally acceptable liquid vehicle. Acceptable vehicles and solvents that may be employed include water, water adjusted to a suitable pH by addition of an appropriate amount of hydrochloric acid, sodium hydroxide or a suitable buffer, 1,3-butanediol, Rin'er's solution, isotonic sodium chloride solution and dextrose solution. The aqueous formulation may also contain one or more preservatives (e.g., methyl, ethyl, or n-propyl p-hydroxybenzoate). In cases where one of the agents is only sparingly or slightly soluble in water, a dissolution enhancing or solubilizing agent can be added, or the solvent may include 10-60% w/w of propylene glycol or the like.

[0240] Modification of pharmaceutical compositions suitable for administration to humans in order to render the compositions suitable for administration to various animals is well understood, and the ordinarily skilled veterinary pharmacologist can design and/or perform such modification with merely ordinary, if any, experimentation. Subjects to which administration of the pharmaceutical compositions is contemplated include, but are not limited to, humans and/or other primates; mammals, domesticated animals, pets, and commercially relevant mammals such as cattle, pigs, horses, sheep, cats, dogs, mice, and/or rats; and/or birds, including commercially relevant birds such as chickens, ducks, geese, and/or turkeys.

[0241] Except insofar as any conventional excipient medium is incompatible with a substance or its derivatives, such as by producing any undesirable biological effect or otherwise interacting in a deleterious manner with any other component(s) of the composition, its use is contemplated to be within the scope of this disclosure.

[0242] In some embodiments, compositions in accordance with the present disclosure can be used for treatment of any of a variety of diseases, disorders, and/or conditions.

### Treatments

[0243] The compositions, polynucleotides, cells (e.g., chimeric antigen receptor T or NK cells), and/or polypeptides (e.g., polypeptides containing a VHH antibody identified by the methods provided herein) provided herein can be used for treating a subject for a disease or disorder, such as a neoplasia (e.g., a lung cancer or an ovarian cancer). Generally, the methods provided herein include administering a therapeutically effective amount of an agent as provided herein, to a subject who is in need of, or who has been determined to be in need of, such treatment.

[0244] The methods provided herein include selecting a subject for and/or administering to a subject having or having a propensity to develop a neoplasia a treatment that includes a therapeutically effective amount of an immunotherapeutic agent, such as a CAR-T cell or CAR NK cell of the disclosure.

[0245] In some instances, the methods provided herein involve administering to a subject in need thereof a VHH domain provided herein that has been conjugated to an agent (e.g., a cytotoxic agent). Antibody-drug conjugates are described, e.g., in Zolog, et al. “Antibody-drug conjugates,” Nature Reviews Drug Discovery, 12:259-260 (2013), the disclosure of which is incorporated herein by reference in its entirety for all purposes.

[0246] An effective amount of an agent can be administered in one or more administrations, applications or dosages. A therapeutically effective amount of a therapeutic compound or agent (i.e., an effective dosage) depends on the therapeutic compounds or agents selected. The compositions can be administered from one or more times per day to one or more times per week; including once every other day. The skilled artisan will appreciate that certain factors may influence the dosage and timing required to effectively treat a subject, including but not limited to the severity of the disease or disorder, previous treatments, the general health and/or age of the subject, and other diseases present. Moreover, treatment of a subject with a therapeutically effective amount of the therapeutic agents provided herein can include a single treatment or a series of treatments.

[0247] Dosage, toxicity and therapeutic efficacy of the therapeutic agents can be determined by standard pharmaceutical procedures in cell cultures or experimental animals, e.g., for determining the LD50 (the dose lethal to 50% of the population) and the ED50 (the dose therapeutically effective in 50% of the population). The dose ratio between toxic and therapeutic effects is the therapeutic index and it can be expressed as the ratio LD50/ED50. Agents which exhibit high therapeutic indices may be used. While agents that exhibit toxic side effects may be used, care should be taken to design a delivery system that targets such agents to the site of affected tissue in order to minimize potential damage to uninfected cells and, thereby, reduce side effects.

[0248] The data obtained from cell culture assays and animal studies can be used in formulating a range of dosage for use in humans. The dosage of such agents lies in various embodiments within a range of circulating concentrations that include the ED50 with little or no toxicity. The dosage may vary within this range depending upon the dosage form employed and the route of administration utilized. For any agent used in the method of the disclosure, the therapeutically effective dose can be estimated initially from cell culture assays. A dose may be formulated in animal models to achieve a circulating plasma concentration range that includes the IC₅₀ (i.e., the concentration of the test agent which achieves a half-maximal inhibition of symptoms) as determined in cell culture. Such information can be used to determine useful doses more accurately in humans. Levels in plasma may be measured, for example, by high performance liquid chromatography.

[0249] Dosages and desired drug concentration of pharmaceutical compositions of the present disclosure may vary depending on the particular use envisioned. The determination of the appropriate dosage or route of administration (e.g., oral administration, intravenous administration as a bolus or by continuous infusion over a period of time, by intramuscular, intraperitoneal, intracerobrospinal, intracranial, intraspinal, subcutaneous, intraarticular, intrasynovial, intrathecal, topical, or inhalation routes) is well within the skill of an ordinary artisan. Animal experiments provide reliable guidance for the determination of effective doses for human therapy. Interspecies scaling of effective doses can be performed following the principles described in Mordenti, J. and Chappell, W. “The Use of Interspecies Scaling in Toxicokinetics,” In Toxicokinetics and New Drug Development, Yacobi et al., Eds, Pergamon Press, New York 1989, pp. 42-46.

[0250] For in vivo administration of any of the agents of the present disclosure, normal dosage amounts may vary from about 10 ng/kg up to about 100 mg/kg of an individ'al's and/or subj'ct's body weight or more per day, depending upon the route of administration. In some embodiments, the dose amount is about 1 mg/kg/day to 10 mg/kg/day. In some embodiments, the dose amount of a CAR-T cell is about, at least about, and/or no more than about 1e5 cells, 1e6 cells, 1e7 cells, 1e8 cells, 1e9 cells, 1e10 cells, 1e11 cells, 1e12 cells, 1e13 cells, 1e14 cells, 1e15 cells, or 1e16 cells. For repeated administrations over several days or longer, depending on the severity of the disease, disorder, or condition to be treated, the treatment is sustained until a desired suppression of symptoms is achieved.

[0251] An effective amount of an agent of the instant disclosure may vary, e.g., from about 0.001 mg/kg to about 1000 mg/kg or more in one or more dose administrations for one or several days (depending on the mode of administration). In certain embodiments, the effective amount per dose varies from about 0.001 mg/kg to about 1000 mg/kg, from about 0.01 mg/kg to about 750 mg/kg, from about 0.1 mg/kg to about 500 mg/kg, from about 1.0 mg/kg to about 250 mg/kg, and from about 10.0 mg/kg to about 150 mg/kg.

[0252] An exemplary dosing regimen may include administering an initial dose of an agent of the disclosure of about 200 μg/kg, followed by a weekly maintenance dose of about 100 μg/kg every other week. Other dosage regimens may be useful, depending on the pattern of pharmacokinetic decay that the physician wishes to achieve. For example, dosing an individual from one to twenty-one times a week is contemplated herein. In certain embodiments, dosing ranging from about 3 μg/kg to about 2 mg/kg (such as about 3 μg/kg, about 10 μg/kg, about 30 μg/kg. about 100 μg/kg, about 300 μg/kg, about 1 mg/kg. or about 2 mg/kg) may be used. In certain embodiments, dosing frequency is three times per day, twice per day, once per day. once every other day. once weekly, once every two weeks, once every four weeks, once every five weeks, once every six weeks, once every seven weeks, once every eight weeks, once every nine weeks, once every ten weeks, or once monthly, once every two months, once every three months, or longer. Progress of the therapy is easily monitored by conventional techniques and assays. The dosing regimen, including the agent(s) administered, can vary over time independently of the dose used.

[0253] Methods for characterizing the efficacy of a treatment for a neoplasia are well known in the art (e.g., computerized tomography (CT) scan, bone scan, magnetic resonance imaging (MRI), position emission tomography (PET) scan, ultrasound X-ray, biopsy, etc.).

### Substantially Identical Amino Acid and Nucleotide Sequences for VHHs

[0254] There is a large body of information in the literature supporting the fact that closely related antibody (Ab) sequences are capable of performing the same binding and therapeutic functions such that this is now generally accepted by those with ordinary skill in the art of immunological sciences. The creation of Abs with small numbers of amino acid sequence variations occurs naturally within mammals and some other animal species during the process of ‘affinity maturation’ in which Ab-producing cells that bind a newly encountered antigen (Ag) are expanded, and their progeny cells contain random mutations within portions of the Ab coding DNA that results in new, related Ab sequences. The cells expressing Abs that have gained improved binding properties for the new Ag are then selected and expanded, thereby increasing the amount of the improved antibody in the animal. This process continues through multiple generations of mutation and selection until Abs with greatly improved antigen binding properties result. The process of Ab affinity maturation demonstrates that related, yet not identical, Ab amino acid sequences can possess similar target binding properties and perform similar therapeutic functions in vivo.

[0255] The present disclosure provides anti-mesothelin VHH antibodies having related sequences that are capable of binding mesothelin. The Abs described herein are heavy-chain only, single domain VHH antibodies, which are generated in camelid alpacas, which have been reported to be convenient sources of camelid VHH antibodies (See, e.g., Maass, D. R. et al., 2007, J. Immunol. Methods, 324:13-25). Briefly, an animal capable of producing VHH antibodies in response to an antigen are immunized with a selected mesothelin antigen (mesothelin Ag) one or multiple times to permit the animal to undergo affinity maturation of the anti-mesothelin VHHs that are produced. Anti-mesothelin VHHs are then isolated and the encoding DNA selected for expression of soluble VHHs that bind mesothelin Ag and have potential therapeutic or diagnostic properties. During this process, many examples of closely related anti-mesothelin binding VHHs are isolated, which are distinctive, and which are presumably intermediates that result from the affinity maturation process which occurs during anti-mesothelin VHH production in alpaca lymphocytes. These related anti-mesothelin VHHs are screened for binding to mesothelin Ag, and the most promising members of homology groups of mesothelin-binding VHHs are identified and become lead candidates for further development.

[0256] Similar to all mammalian antibodies, VHHs consist of four, well-conserved ‘framework’ regions (FRs) which are important in forming the antibody structure. Between the FRs (FR1, FR2, FR3 and FR4) are three much less well-conserved CDRs or hypervariable regions (CDR1, CDR2 and CDR3) which principally interact with and bind to antigenic determinants or epitopes on antigens (Ags), such as mesothelin. The CDR sequences vary widely so as to interact and bind to epitopes of Ags. The third CDR, CDR3, is generally the longest in sequence and is most diverse of the CDRs within VHHs, both in size and sequence. By way of nonlimiting example, CDR3 in VHHs can range in size from about 5 to about 30 amino acid residues. Without intending to be bound by theory, VHHs and CDR3 regions that bind to the same mesothelin target Ag are considered to have resulted from affinity maturation of a common precursor VHH within the animal and are classified as a ‘homology group.’ Individual VHHs within a homology group are classified by their binding to the target Ag, and the members of the VHH homology group are able to ‘compete’ with each other for binding to the Ag, thus demonstrating that they bind to the same region on the target Ag. In VHH molecules, the CDRs (CDR1, CDR2 and CD3) play a role in the ability of a VHH to bind to the target Ag, e.g., mesothelin, in conjunction with CDR1 and CDR2.

[0257] Since the FRs maintain the structure of a VHH and the positioning of the CDRs for binding to the target Ag, the FRs of VHHs typically do not vary extensively in sequence (FIG. 1). However, some VHH FR amino acid sequence variation is permissible, particularly in cases in which an amino acid substitution involves the replacement or substitution of one amino acid with another amino acid having similar properties (e.g., similarity in being charged or uncharged), i.e., a conservative substitution. Such conservative changes in FRs can often be found naturally within VHHs that have undergone affinity maturation in an animal. Similar to the case with FRs, VHH CDRs also typically do not vary extensively in amino acid sequence or type so as not to compromise their ability to specifically bind to Ag. As would be appreciated by one skilled in the art, an estimation of the extent of amino acid sequence variation that can be tolerated within VHHs without compromising their Ag binding ability can be made by observing the variation that occurs naturally within affinity-matured homology groups of VHHs isolated from the same types of animals and which bind to the same Ag.

[0258] In an embodiment, sequence variation is particularly acceptable in the CDR regions, e.g., CDR1, CDR2, and/or CDR3, while the feature of VHH binding to antigen mesothelin is maintained. In an embodiment, amino acid sequence variation results from conservative amino acid substitutions in a VHH sequence. In an embodiment, the conservative amino acid substitutions are in one or more CDR sequences of the VHH polypeptide. In an embodiment, the conservative amino acid substitutions are in one or more FR sequences of the VHH polypeptide. In an embodiment, the conservative amino acid substitutions are in one or more CDR sequences and in one or more FR sequences of the VHH polypeptide.

[0259] An example evidencing that VHH sequence variation is acceptable within related VHHs having the same Ag binding characteristics is described in Tremblay et al., 2013, Infect Immun 81:4592-4603. In this report, 11 VHH sequences comprise a large homology group with closely related CDR3 sequences, and the unusual property of cross-specific binding to two different Shiga toxins, Stx1 and Stx2. Two of the more distantly related VHH members of this homology group are characterized as having common Ag binding characteristics. These two related VHHs were found to have 32 amino acid changes in the total VHH sequence of 120 or 121 residues. Thus, a 26% variation in amino acid sequence did not adversely affect the common Ag binding properties of the VHH proteins.

### Kits

[0260] The disclosure also provides kits for use in the methods of the disclosure. Kits of the instant disclosure may include one or more containers comprising an agent provided herein, such as a polypeptide (e.g., a VHH antibody) or a polynucleotide encoding the same or a cell (e.g., a CAR-T cell). In some embodiments, the kits further include instructions for use in accordance with the methods of this disclosure. In some embodiments, these instructions comprise a description of use of the agent to treat a disease or identify VHH antibodies that bind a target antigen. The kit may further comprise a description of how to analyze and/or interpret data.

[0261] Instructions supplied in the kits of the instant disclosure are typically written instructions on a label or package insert (e.g., a paper sheet included in the kit), but machine-readable instructions (e.g., instructions carried on a magnetic or optical storage disk) are also acceptable. Instructions may be provided for practicing any of the methods described herein.

[0262] The kits of this disclosure are in suitable packaging. Suitable packaging includes, but is not limited to, vials, bottles, jars, flexible packaging (e.g., sealed Mylar or plastic bags), and the like. Kits may optionally provide additional components such as buffers and interpretive information. Normally, the kit comprises a container and a label or package insert(s) on or associated with the container.

[0263] The practice of the various aspects and embodiments of the present disclosure employs, unless otherwise indicated, conventional techniques of molecular biology (including recombinant techniques), microbiology, cell biology, biochemistry and immunology, which are well within the purview of the skilled artisan. Such techniques are explained fully in the literature, such as, “Molecular Cloning: A Laboratory Manual”, second edition (Sambrook, 1989); “Oligonucleotide Synthesis” (Gait, 1984); “Animal Cell Culture” (Freshney, 1987); “Methods in Enzymology” “Handbook of Experimental Immunology” (Weir, 1996); “Gene Transfer Vectors for Mammalian Cells” (Miller and Calos, 1987); “Current Protocols in Molecular Biology” (Ausubel, 1987); “PCR: The Polymerase Chain Reaction”, (Mullis, 1994); “Current Protocols in Immunology” (Coligan, 1991). These techniques are applicable to the production of the polynucleotides and polypeptides of the disclosure, and, as such, may be considered in making and practicing the various aspects and embodiments of the disclosure. Particularly useful techniques for specific embodiments will be discussed in the sections that follow.

[0264] The following examples are put forth so as to provide those of ordinary skill in the art with a complete disclosure and description of how to make and use the assay, screening, and therapeutic methods of the disclosure, and are not intended to limit the scope of what the inventors regard as their invention.

### EXAMPLES

### Example 1: Discovery of Anti-Mesothelin VHH Antibodies

[0265] Experiments were undertaken to develop VHH antibodies capable of binding mesothelin. To develop the VHH antibodies, mice (i.e., nanomice) capable of producing VHH antibodies (i.e., nanobodies) in response to an antigen were vaccinated with a live vaccine containing antigen presenting cells expressing mesothelin (FIG. 2). The antigen presenting cells were DC2.4 cells transduced with expression constructs encoding mesothelin. The transduced DC2.4 cells surface-presented mesothelin antigens. Evaluation of serum samples from the vaccinated nanomice confirmed that the mice produced anti-mesothelin VHH antibodies.

[0266] Having established that the vaccinated nanomice produced anti-mesothelin nanobodies, experiments were undertaken (e.g., as shown in FIG. 3) to clone and characterize anti-mesothelin VHH antibodies produced by the mice. First, cDNA was prepared using nanobody-encoding mRNA from the nanomice and the encoded nanobodies were cloned in-frame into an expression vector encoding a chimeric antigen receptor (CAR) such that the nanobodies would function as the antigen-binding domain of the encoded CAR. The chimeric antigen receptors contained from N-terminus to C-terminus a CD28 signal peptide, a cloned VHH domain as an antigen-binding domain (ABD), a CD8 hinge domain, a CD28 transmembrane domain, a CD28 cytoplasmic domain, and a CD3ζ domain. The expression construct further encoded an enhanced GFP (eGFP) protein linked to the C-terminus of the CAR by a P2A self-cleaving peptide. The expression vectors were cloned into bacteria and colonies containing the expression vectors were randomly selected and the VHH domains of the expression vectors corresponding to each colony were sequenced. Next, following sequencing, the five VHH domains M3_C7, Ab_119706, Ab_119699, Ab_119704, and Ab_119707 (sequences provided in Tables 1-3B) were selected for further characterization using flow cytometry. Lentiviral vectors containing polynucleotides encoding the selected sequenced chimeric antigen receptors (CAR) were prepared and transduced into Jurkat cells containing an activation reporter cassette that expressed the fluorescent protein mKate when the cells expressing the CARs were activated by the CARs binding mesothelin. The Jurkat cells expressing the CARs were co-cultured with target cells surface-presenting mesothelin (MSLN+) for about 48 hours and expression of GFP (to measure CAR expression) and mKate (to measure cell activation) was measured. As controls, the CAR-T Jurkat cells were also cultured in the presence of cells that did not express mesothelin (MSLN-) or were cultured in the absence of any other cells (i.e., CAR-Ts only). All five of the CAR-expressing Jurkat cells were activated when co-cultured with the target cells (e.g., FIG. 5).

[0267] In addition to the characterization of the five anti-mesothelin nanobodies characterized as described above, 14 VHH antibodies and two negative controls (AB 72064, which was a non-VHH control, and ABE_72042, which was a nonsense sequence that did not encode any functional VHH) were selected for synthesis into pSLCAR vectors (see below sequence), which were then used to prepare Jurkat reporter CAR-T cells as described above. These cells were then co-cultured in the presence of MSLN+target cells and activation was measured using flow cytometry (FIGS. 4 and 5). As controls, the CAR-T Jurkat cells were also cultured in the presence of cells that did not express mesothelin (MSLN-) or were cultured in the absence of any other cells (i.e., CAR-Ts only). Many of these additional VHHs were also associated with activation of Jurkat cells expressing chimeric antigen receptors (CARs) containing the VHHs as antigen binding domains. The analysis of these 14 VHHs led to the discovery of the following VHH antibodies: M1_C8, M3_C3, Ab_119700, Ab_119701, M3_C6, Ab_119696, Ab_113415, and Ab_119702 (see sequences provided in sequences provided in Tables 1-3B). Sequences for further polypeptides evaluated are provided in Table 7.

### Example 2: In Vivo Validation of Anti-Mesothelin (MSLN) VHH Antibodies

[0268] Experiments were undertaken to validate the ability of the anti-MSLN VHH antibodies to function as antigen-binding domains of chimeric antigen receptors expressed by T cells to enable the chimeric antigen receptor-expressing T cells (i.e., CAR-T cells) to control tumors in vivo. 1e9 peripheral blood mononuclear cells (PBMCs) were obtained from StemCell Technologies and CD3 positive T cells were isolated using negative bead-based selection. The isolated T cells were immediately activated using CD3/28 activation Dynabeads (Gibco, 11131D) 1:1. After 24 hours activation, lentivirus vectors were used to introduce expression constructs encoding the chimeric antigen receptor polypeptides to the T cells. The chimeric antigen receptor polypeptides contained one of the following antibodies as an antigen binding domain: Ab_113415, Ab_119702, Ab_119704, Ab_119706, and SS1. The CARs containing an SS1 antigen-binding domain (“SS1 CARs”) were used as a positive control (see, e.g., Castelletti, et al. Biomark Res 9, 11 (2021) doi.org/10.1186/s40364-021-00264-1, the disclosure of which is hereby incorporated by reference in its entirety for all purposes). Amino acid and nucleotide sequences for the chimeric antigen receptors containing the VHH antibodies as antigen binding domains are provided at Table 9. Lentivirus and activation beads were removed at 48 hours post-activation. The resulting CAR-T cells (“the effector cells”) were allowed to expand for 10 days (FIGS. 8A and 8B). During CAR-T expansion, K562_pLX311-MSLN target cells (i.e., K562 cells modified to surface-express mesothelin) were simultaneously expanded for use to be administered subcutaneously (SC) to mice. The target cells were checked to ensure purity of MSLN expression (>99%) prior to injection (FIG. 8C). 1.5e6 K562_pLX311-MSLN cells were resuspended in 50% HBSS, 50% growth factor reduced Matrigel (VWR International LLC, 47743-722) and injected SC into the right flank of NSG mice. An in vitro cytotoxicity assay was also performed using an effector (CAR-T cells) to target (K562_pLX311-MSLN cells) cell ratio (E:T) of 1:3 (FIG. 8D) confirming the ability of the CAR-T cells to kill the target cells. 3 days following the SC injection (Day 3) of the target cells, the mice were tail vein injected with 5e6 of the CAR-T cells. Tumor growth was measured every 3-4 days for the duration of the experiment to assess CAR-T efficacy (FIGS. 8E and 8F). As expected, the tumors rapidly grew in mice that were not treated or that received unmodified T cells (i.e., T cells that did not express a CAR). Compared to T cells expressing the SS1 CARs, the clinical benchmark, the CAR-T cells expressing CARs containing VHH antibodies as their antigen-binding domains demonstrated superior tumor control, particularly in the case of the VHH antibodies Ab_113415 and Ab_119704. Survival was significantly extended for mice administered CAR-T cells expressing CARs containing VHH antibodies as their antigen-binding domains, as compared to mice administered CAR-T cells expressing the SS1 CARs (FIG. 8G).

### Example 3: Characterization of the Ability of Anti-Mesothelin (MSLN) VHH Antibodies to Bind Mesothelin

[0269] Experiments were undertaken to characterize the ability of the anti-MSLN VHH antibodies to bind MSLN. 6×His tagged (SEQ ID NO: 93) VHH antibodies were produced by Genscript in a mammalian cell line and purified. The purified VHH antibodies were tested using a flow cytometry-based assay to see how well they bound mesothelin expressed on cells (FIG. 9A). K562_pLX311-MSLN (i.e., K562 cells modified to surface-express mesothelin) and unmodified K562 cells that did not surface-express mesothelin were immunostained using the purified nanobodies at concentrations ranging from <0.001p g/mL to 1.0 μg/mL (FIG. 9A). Also, biolayer interferometry (BLI) was used to accurately assess the binding affinity (K_{d}) of the anti-MSLN VHH antibodies (Table 5). BLI was conducted with soluble MSLN (Glu2-6-Gly580, Acro Bio Systems, MSN-H82E9-25 ug). Of the anti-MSLN VHH antibodies tested, at least 5 bound MSLN with K_{d}<12 nM. In addition to determining the K_{d} of the anti-MSLN VHH antibodies, the ability of the CAR-T cells used in the in vivo experiments described above in Example 2 to bind soluble MSLN was measured (FIG. 9B) by exposing the CAR-T cells to media containing soluble MSLN (Glu2-6-Gly580, Acro Bio Systems, MSN-H82E9-25 ug) at 1.0 μg/mL for 30 minutes at 4° C. After exposure to the media containing the soluble MSLN, an anti-His secondary antibody was used to detect CAR-T cells binding the MSLN. T cells expressing CARs containing the anti-MSLN VHH antibodies or SS1 as antigen binding domains bound the soluble MSLN.

TABLE 5
K_{d} values for binding to MSLN for the indicated VHH antibodies

| Nanobody ID | K_{d} (nM) |
|---|---|
| Ab_119699 | Not Determined |
| Ab_113415 | 3.689 |
| Ab_119704 | 4.493 |
| Ab_119702 | 5.320 |
| Ab_119707 | 5.953 |
| Ab_119706 | 11.510 |

### Example 4: Binding of Anti-Mesothelin (MSLN) VHH Antibodies to Endogenously Expressed MSLN

[0270] Experiments were undertaken demonstrate that the anti-MSLN VHH antibodies were capable of binding endogenously expressed MSLN. The AsPC-1 (ATCC, CRL-1682) human pancreatic cell line was chosen in part based on predicted high MSLN expression from RNAseq data. AsPC-1 cells were immunostained by first contacting the cells with the anti-MSLN VHH antibodies produced as described in Example 4 followed by being contacted with anti-His antibodies conjugated to an AF647 fluorescent dye. Additionally, as a control, AsPC-1 cells were labeled with a commercially available anti-MSLN antibody (R&D Systems, FAB32652A). Several of the anti-MSLN VHH antibodies were capable of binding endogenously expressed MSLN (FIG. 10). Interestingly, the commercially available antibody, which was intended to act as positive control, was not effective in immunostaining the cells.

### Example 5: Clustering of Anti-Mesothelin (MSLN) VHH Antibody Sequences

[0271] To identify maximally diverse anti-MSLN VHH antibody sequences, full-length anti-MSLN VHH antibody amino acid sequences were clustered and projected into t-SNE space (FIG. 11). Clustering was performed by analyzing the amino acid relationships using the Cluster K-Spaced Amino Acid algorithm to determine similarity/dissimilarity between each sequence. The sequence clonotype abundance threshold was set to >=5. The resulting relationship feature matrix was dimensionally reduced to 2D space by t-SNE and then further cluster architecture was established by using K-means nearest neighbor. In addition, sequences from the anti-MSLN VHH antibodies M3 C7, Ab_119702, Ab_119706, Ab_113415, Ab_119704, Ab_119699, and Ab_119707 were mapped onto the data (see stars in FIG. 11). The plot revealed seven distinct clusters to which each anti-MSLN VHH antibody belonged. The sequences for all polypeptides falling within a cluster containing the M3_C7, Ab 119702, Ab_119706, Ab 113415, Ab 119704, Ab 119699, or Ab_119707 are listed in Tables 8A-8G below. The sequences within each cluster were highly similar and may represent additional MSLN binders.

[0272] A further clustering analysis of the amino acid sequences was completed according to a method similar to that described above but using sequences more stringently filtered to assist in the improvement of the feature matrix used to prepare the clusters. Sequences from the anti-MSLN VHH antibodies M3_C7, Ab 119702, Ab 119706, Ab 113415, Ab_119704, Ab_119699, and Ab_119707 were mapped onto the data (see stars in FIG. 12). The sequences for all polypeptides falling within each cluster are listed in Tables 10A-10M below, and consensus sequences for complementarity determining regions corresponding to each cluster are provided in Table 11.

### Sequences

[0273] What follows is the nucleotide sequence of the chimeric antigen receptor (CAR) plasmid (pSLCAR-VHH) used for cloning of VHH domains, where the nucleotide sequence encoding a chimeric antigen receptor polypeptide linked to enhanced green fluorescent protein (eGFP) polypeptide by way of a self-cleaving peptide (P2A), and prior to insertion of an anti-mesothelin VHH domain sequence, is shown in BOLD UPPERCASE TEXT. In the below sequence, sites recognized by the Bpil restriction enzyme are shown as BOLD, UPPERCASE, UNDERLINED TEXT. A map of the plasmid is provided at FIGS. 6A and 6B, and Tables 6A and 6B provide amino acid and polynucleotide sequences corresponding to the features labeled in the plasmid map.

(SEQ ID NO: 131)
gacattgattattgactagttattaatagtaatcaattacggggtcattagttcatagccca
tatatggagttccgcgttacataacttacggtaaatggcccgcctggctgaccgcccaacga
cccccgcccattgacgtcaataatgacgtatgttcccatagtaacgccaatagggactttcc
attgacgtcaatgggtggagtatttacggtaaactgcccacttggcagtacatcaagtgtat
catatgccaagtacgccccctattgacgtcaatgacggtaaatggcccgcctggcattatgc
ccagtacatgaccttatgggactttcctacttggcagtacatctacgtattagtcatcgcta
ttaccatggtgatgcggttttggcagtacatcaatgggcgtggatagcggtttgactcacgg
ggatttccaagtctccaccccattgacgtcaatgggagtttgttttggcaccaaaatcaacg
ggactttccaaaatgtcgtaacaactccgccccattgacgcaaatgggcggtaggcgtgtac
ggtgggaggtctatataagcagcgcgttttgcctgtactgggtctctctggttagaccagat
ctgagcctgggagctctctggctaactagggaacccactgcttaagcctcaataaagcttgc
cttgagtgcttcaagtagtgtgtgcccgtctgttgtgtgactctggtaactagagatccctc
agacccttttagtcagtgtggaaaatctctagcagtggcgcccgaacagggacttgaaagcg
aaagggaaaccagaggagctctctcgacgcaggactcggcttgctgaagcgcgcacggcaag
aggcgaggggcggcgactggtgagtacgccaaaaattttgactagcggaggctagaaggaga
gagatgggtgcgagagcgtcagtattaagcgggggagaattagatcgcgatgggaaaaaatt
cggttaaggccagggggaaagaaaaaatataaattaaaacatatagtatgggcaagcaggga
gctagaacgattcgcagttaatcctggcctgttagaaacatcagaaggctgtagacaaatac
tgggacagctacaaccatcccttcagacaggatcagaagaacttagatcattatataataca
gtagcaaccctctattgtgtgcatcaaaggatagagataaaagacaccaaggaagctttaga
caagatagaggaagagcaaaacaaaagtaagaccaccgcacagcaagcggccgctgatcttc
agacctggaggaggagatatgagggacaattggagaagtgaattatataaatataaagtagt
aaaaattgaaccattaggagtagcacccaccaaggcaaagagaagagtggtgcagagagaaa
aaagagcagtgggaataggagctttgttccttgggttcttgggagcagcaggaagcactatg
ggcgcagcgtcaatgacgctgacggtacaggccagacaattattgtctggtatagtgcagca
gcagaacaatttgctgagggctattgaggcgcaacagcatctgttgcaactcacagtctggg
gcatcaagcagctccaggcaagaatcctggctgtggaaagatacctaaaggatcaacagctc
ctggggatttggggttgctctggaaaactcatttgcaccactgctgtgccttggaatgctag
ttggagtaataaatctctggaacagatttggaatcacacgacctggatggagtgggacagag
aaattaacaattacacaagcttaatacactccttaattgaagaatcgcaaaaccagcaagaa
aagaatgaacaagaattattggaattagataaatgggcaagtttgtggaattggtttaacat
aacaaattggctgtggtatataaaattattcataatgatagtaggaggcttggtaggtttaa
gaatagtttttgctgtactttctatagtgaatagagttaggcagggatattcaccattatcg
tttcagacccacctcccaaccccgaggggaccccgggtttattacagggacagcagagatcc
actttggcgccggctcgagttttaaaagaaaaggggggattggggggtacagtgcaggggaa
agaatagtagacataatagcaacagacatacaaactaaagaattacaaaaacaaattacaaa
aattcaaaatttttcgagtggctccggtgcccgtcagtgggcagagcgcacatcgcccacag
tccccgagaagttggggggaggggtcggcaattgaaccggtgcctagagaaggtggcgcggg
gtaaactgggaaagtgatgtcgtgtactggctccgcctttttcccgagggtgggggagaacc
gtatataagtgcagtagtcgccgtgaacgttctttttcgcaacgggtttgccgccagaacac
aggtgtcgtgacgcgggatccgccaccATGCTCAGGCTGCTCTTGGCTCTCAACTTATTCCC
TTCAATTCAAGTAACAGGAGGGTCTTCCTTTTTTGAAGACCCGACGCCAGCGCCAACTATTG
CGAGTCAGCCTCTCAGTCTGCGACCTGAGGCTTGTCGACCAGCAGCCGGAGGCGCAGTGCAC
ACGAGGGGGCTGGACTTCGCCTGTGATCCTTCTAAGCCCTTTTGGGTGCTGGTGGTGGTTGG
TGGAGTCCTGGCTTGCTATAGCTTGCTAGTAACAGTGGCCTTTATTATTTTCTGGGTGAGGA
AACGGGGCAGAAAGAAACTCCTGTATATATTCAAACAACCATTTATGAGACCAGTACAAACT
ACTCAAGAGGAAGATGGCTGTAGCTGCCGATTTCCAGAAGAAGAAGAAGGAGGATGTGAACT
GGCTAGCCTGAGAGTGAAGTTCAGCAGGAGCGCAGACGCCCCCGCGTACCAGCAGGGCCAGA
ACCAGCTCTATAACGAGCTCAATCTAGGACGAAGAGAGGAGTACGATGTTTTGGACAAGAGA
CGTGGCCGGGACCCTGAGATGGGGGGAAAGCCGCAGAGAAGGAAGAACCCTCAGGAAGGCCT
GTACAATGAACTGCAGAAAGATAAGATGGCGGAGGCCTACAGTGAGATTGGGATGAAAGGCG
AGCGCCGGAGGGGCAAGGGGCACGATGGCCTTTACCAGGGTCTCAGTACAGCCACCAAGGAC
ACCTACGACGCCCTTCACATGCAGGCCCTGCCCCCTCGCGCTAGCGCCACGAACTTCTCTCT
GTTAAAGCAAGCAGGCGACGTGGAAGAAAACCCCGGTCCCGTGAGCAAGGGCGAGGAGCTGT
TCACCGGGGTGGTGCCCATCCTGGTCGAGCTGGACGGCGACGTAAACGGCCACAAGTTCAGC
GTGTCCGGCGAGGGCGAGGGCGATGCCACCTACGGCAAGCTGACCCTGAAGTTCATCTGCAC
CACCGGCAAGCTGCCCGTGCCCTGGCCCACCCTCGTGACCACCCTGACCTACGGCGTGCAGT
GCTTCAGCCGCTACCCCGACCACATGAAGCAGCACGACTTCTTCAAGTCCGCCATGCCCGAA
GGCTACGTCCAGGAGCGCACCATCTTCTTCAAGGACGACGGCAACTACAAGACCCGCGCCGA
GGTGAAGTTCGAGGGCGACACCCTGGTGAACCGCATCGAGCTGAAGGGCATCGACTTCAAGG
AGGACGGCAACATCCTGGGGCACAAGCTGGAGTACAACTACAACAGCCACAACGTCTATATC
ATGGCCGACAAGCAGAAGAACGGCATCAAGGTGAACTTCAAGATCCGCCACAACATCGAGGA
CGGCAGCGTGCAGCTCGCCGACCACTACCAGCAGAACACCCCCATCGGCGACGGCCCCGTGC
TGCTGCCCGACAACCACTACCTGAGCACCCAGTCCGCCCTGAGCAAAGACCCCAACGAGAAG
CGCGATCACATGGTCCTGCTGGAGTTCGTGACCGCCGCCGGGATCACTCTCGGCATGGACGA
GCTGTACAAGtaacgcgttaagtcgacaatcaacctctggattacaaaatttgtgaaagatt
gactggtattcttaactatgttgctccttttacgctatgtggatacgctgctttaatgcctt
tgtatcatgctattgcttcccgtatggctttcattttctcctccttgtataaatcctggttg
ctgtctctttatgaggagttgtggcccgttgtcaggcaacgtggcgtggtgtgcactgtgtt
tgctgacgcaacccccactggttggggcattgccaccacctgtcagctcctttccgggactt
tcgctttccccctccctattgccacggcggaactcatcgccgcctgccttgcccgctgctgg
acaggggctcggctgttgggcactgacaattccgtggtgttgtcggggaaatcatcgtcctt
tccttggctgctcgcctgtgttgccacctggattctgcgcgggacgtccttctgctacgtcc
cttcggccctcaatccagcggaccttccttcccgcggcctgctgccggctctgcggcctctt
ccgcgtctttgccttcgccctcagacgagtcggatctccctttgggccgcctccccgcgtcg
actttaagaccaatgacttacaaggcagctgtagatcttagccactttttaaaagaaaaggg
gggactggaagggctaattcactcccaacgaagataagatctgctttttgcttgtactgggt
ctctctggttagaccagatctgagcctgggagctctctggctaactagggaacccactgctt
aagcctcaataaagcttgccttgagtgcttcaagtagtgtgtgcccgtctgttgtgtgactc
tggtaactagagatccctcagacccttttagtcagtgtggaaaatctctagcagtacgtata
gtagttcatgtcatcttattattcagtatttataacttgcaaagaaatgaatatcagagagt
gagaggaacttgtttattgcagcttataatggttacaaataaagcaatagcatcacaaattt
cacaaataaagcatttttttcactgcattctagttgtggtttgtccaaactcatcaatgtat
cttatcatgtctggctctagctatcccgcccctaactccgcccatcccgcccctaactccgc
ccagttccgcccattctccgccccatggctgactaattttttttatttatgcagaggccgag
gccgcctcggcctctgagctattccagaagtagtgaggaggcttttttggaggcctagggac
gtacccaattcgccctatagtgagtcgtattacgcgcgctcactggccgtcgttttacaacg
tcgtgactgggaaaaccctggcgttacccaacttaatcgccttgcagcacatccccctttcg
ccagctggcgtaatagcgaagaggcccgcaccgatcgcccttcccaacagttgcgcagcctg
aatggcgaatgggacgcgccctgtagcggcgcattaagcgcggcgggtgtggtggttacgcg
cagcgtgaccgctacacttgccagcgccctagcgcccgctcctttcgctttcttcccttcct
ttctcgccacgttcgccggctttccccgtcaagctctaaatcgggggctccctttagggttc
cgatttagtgctttacggcacctcgaccccaaaaaacttgattagggtgatggttcacgtag
tgggccatcgccctgatagacggtttttcgccctttgacgttggagtccacgttctttaata
gtggactcttgttccaaactggaacaacactcaaccctatctcggtctattcttttgattta
taagggattttgccgatttcggcctattggttaaaaaatgagctgatttaacaaaaatttaa
cgcgaattttaacaaaatattaacgcttacaatttaggtggcacttttcggggaaatgtgcg
cggaacccctatttgtttatttttctaaatacattcaaatatgtatccgctcatgagacaat
aaccctgataaatgcttcaataatattgaaaaaggaagagtatgagtattcaacatttccgt
gtcgcccttattcccttttttgcggcattttgccttcctgtttttgctcacccagaaacgct
ggtgaaagtaaaagatgctgaagatcagttgggtgcacgagtgggttacatcgaactggatc
tcaacagcggtaagatccttgagagttttcgccccgaagaacgttttccaatgatgagcact
tttaaagttctgctatgtggcgcggtattatcccgtattgacgccgggcaagagcaactcgg
tcgccgcatacactattctcagaatgacttggttgagtactcaccagtcacagaaaagcatc
ttacggatggcatgacagtaagagaattatgcagtgctgccataaccatgagtgataacact
gcggccaacttacttctgacaacgatcggaggaccgaaggagctaaccgcttttttgcacaa
catgggggatcatgtaactcgccttgatcgttgggaaccggagctgaatgaagccataccaa
acgacgagcgtgacaccacgatgcctgtagcaatggcaacaacgttgcgcaaactattaact
ggcgaactacttactctagcttcccggcaacaattaatagactggatggaggcggataaagt
tgcaggaccacttctgcgctcggcccttccggctggctggtttattgctgataaatctggag
ccggtgagcgtgggtctcgcggtatcattgcagcactggggccagatggtaagccctcccgt
atcgtagttatctacacgacggggagtcaggcaactatggatgaacgaaatagacagatcgc
tgagataggtgcctcactgattaagcattggtaactgtcagaccaagtttactcatatatac
tttagattgatttaaaacttcatttttaatttaaaaggatctaggtgaagatcctttttgat
aatctcatgaccaaaatcccttaacgtgagttttcgttccactgagcgtcagaccccgtaga
aaagatcaaaggatcttcttgagatcctttttttctgcgcgtaatctgctgcttgcaaacaa
aaaaaccaccgctaccagcggtggtttgtttgccggatcaagagctaccaactctttttccg
aaggtaactggcttcagcagagcgcagataccaaatactgttcttctagtgtagccgtagtt
aggccaccacttcaagaactctgtagcaccgcctacatacctcgctctgctaatcctgttac
cagtggctgctgccagtggcgataagtcgtgtcttaccgggttggactcaagacgatagtta
ccggataaggcgcagcggtcgggctgaacggggggttcgtgcacacagcccagcttggagcg
aacgacctacaccgaactgagatacctacagcgtgagctatgagaaagcgccacgcttcccg
aagggagaaaggcggacaggtatccggtaagcggcagggtcggaacaggagagcgcacgagg
gagcttccagggggaaacgcctggtatctttatagtcctgtcgggtttcgccacctctgact
tgagcgtcgatttttgtgatgctcgtcaggggggcggagcctatggaaaaacgccagcaacg
cggcctttttacggttcctggccttttgctggccttttgctcacatgtgtcgacggatcggg
agatctcccgatcccctatggtgcactctcagtacaatctgctctgatgccgcatagttaag
ccagtatctgctccctgcttgtgtgttggaggtcgctgagtagtgcgcgagcaaaatttaag
ctacaacaaggcaaggcttgaccgacaattgcatgaagaatctgcttagggttaggcgtttt
gcgctgcttcgcgatgtacgggccagatatacgcgtt

[0274] What follows is the amino acid sequence encoded by the BOLD ALL CAPS sequence shown above, which corresponds to a CAR sequence lacking an antigen binding domain (e.g., a VHH domain) that is linked to enhanced green fluorescent protein (eGFP) polypeptide by way of a self-cleaving peptide (P2A).

(SEQ ID NO: 132)
MLRLLLALNLFPSIQVTGGSSFFEDPTPAPTIASQPLSLRPEACRPAAGGAVHTRGLDFACD
PSKPFWVLVVVGGVLACYSLLVTVAFIIFWVRKRGRKKLLYIFKQPFMRPVQTTQEEDGCSC
RFPEEEEGGCELASLRVKFSRSADAPAYQQGQNQLYNELNLGRREEYDVLDKRRGRDPEMGG
KPQRRKNPQEGLYNELQKDKMAEAYSEIGMKGERRRGKGHDGLYQGLSTATKDTYDALHMQA
LPPRASATNFSLLKQAGDVEENPGPVSKGEELFTGVVPILVELDGDVNGHKFSVSGEGEGDA
TYGKLTLKFICTTGKLPVPWPTLVTTLTYGVQCFSRYPDHMKQHDFFKSAMPEGYVQERTIF
FKDDGNYKTRAEVKFEGDTLVNRIELKGIDFKEDGNILGHKLEYNYNSHNVYIMADKQKNGI
KVNFKIRHNIEDGSVQLADHYQQNTPIGDGPVLLPDNHYLSTQSALSKDPNEKRDHMVLLEF
VTAAGITLGMDELYK

[0275] What follows is the nucleotide sequence of the plasmid encoding the activation reporter cassette used in the Examples. A map of the plasmid is provided at FIGS. 7A and 7B, and Tables 6A and 6B provide amino acid and polynucleotide sequences corresponding to the features labeled in the plasmid map.

(SEQ ID NO: 133)
ggccgccagcacagtggtcgatcgacgataaaataaaagattttatttagtctccagaaaaa
ggggggaatgaaagaccccacctgtaggtttggcaagctagcttaagtaacgccattttgca
aggcatggaaaaatacataactgagaatagaaaagttcagatcaaggtcaggaacagatgga
acagggtcgcgtcccgcaataaaagagcccacaacccctcactcggggcgccagtcctccga
ttgactgagtcgcccgggtacccgtgtatccaataaaccctcttgcagttgcatccgacttg
tggtctcgctgttccttgggagggtctcctctgagtgattgactacccgtcagcgggggtct
ttcacatgcagcatgtatcaaaattaatttggttttttttcttaagtatttacattaaatgg
ccatagtagttcattatggacagcgcagaaagagctggggagaattgtgaaattgttatccg
ctcacaattccacacaacatacgagccggaagcataaagtgtaaagcctggggtgcctaatg
agtgagctaactcacattaattgcgttgcgctcactgcccgctttccagtcgggaaacctgt
cgtgccagctgcattaatgaatcggccaacgcgcggggagaggcggtttgcgtattgggcgc
tcttccgcttcctcgctcactgactcgctgcgctcggtcgttcggctgcggcgagcggtatc
agctcactcaaaggcggtaatacggttatccacagaatcaggggataacgcaggaaagaaca
tgtgagcaaaaggccagcaaaaggccaggaaccgtaaaaaggccgcgttgctggcgtttttc
cataggctccgcccccctgacgagcatcacaaaaatcgacgctcaagtcagaggtggcgaaa
cccgacaggactataaagataccaggcgtttccccctggaagctccctcgtgcgctctcctg
ttccgaccctgccgcttaccggatacctgtccgcctttctcccttcgggaagcgtggcgctt
tctcatagctcacgctgtaggtatctcagttcggtgtaggtcgttcgctccaagctgggctg
tgtgcacgaaccccccgttcagcccgaccgctgcgccttatccggtaactatcgtcttgagt
ccaacccggtaagacacgacttatcgccactggcagcagccactggtaacaggattagcaga
gcgaggtatgtaggcggtgctacagagttcttgaagtggtggcctaactacggctacactag
aagaacagtatttggtatctgcgctctgctgaagccagttaccttcggaaaaagagttggta
gctcttgatccggcaaacaaaccaccgctggtagcggtggtttttttgtttgcaagcagcag
attacgcgcagaaaaaaaggatctcaagaagatcctttgatcttttctacggggtctgacgc
tcagtggaacgaaaactcacgttaagggattttggtcatgagattatcaaaaaggatcttca
cctagatccttttgcggccggccgcaaatcaatctaaagtatatatgagtaaacttggtctg
acagttaccaatgcttaatcagtgaggcacctatctcagcgatctgtctatttcgttcatcc
atagttgcctgactccccgtcgtgtagataactacgatacgggagggcttaccatctggccc
cagtgctgcaatgataccgcgagacccacgctcaccggctccagatttatcagcaataaacc
agccagccggaagggccgagcgcagaagtggtcctgcaactttatccgcctccatccagtct
attaattgttgccgggaagctagagtaagtagttcgccagttaatagtttgcgcaacgttgt
tgccattgctacaggcatcgtggtgtcacgctcgtcgtttggtatggcttcattcagctccg
gttcccaacgatcaaggcgagttacatgatcccccatgttgtgcaaaaaagcggttagctcc
ttcggtcctccgatcgttgtcagaagtaagttggccgcagtgttatcactcatggttatggc
agcactgcataattctcttactgtcatgccatccgtaagatgcttttctgtgactggtgagt
actcaaccaagtcattctgagaatagtgtatgcggcgaccgagttgctcttgcccggcgtca
atacgggataataccgcgccacatagcagaactttaaaagtgctcatcattggaaaacgttc
ttcggggcgaaaactctcaaggatcttaccgctgttgagatccagttcgatgtaacccactc
gtgcacccaactgatcttcagcatcttttactttcaccagcgtttctgggtgagcaaaaaca
ggaaggcaaaatgccgcaaaaaagggaataagggcgacacggaaatgttgaatactcatact
cttcctttttcaatattattgaagcatttatcagggttattgtctcatgagcggatacatat
ttgaatgtatttagaaaaataaacaaataggggttccgcgcacatttccccgaaaagtgcca
ccagctttgctcttaggagtttcctaatacatcccaaactcaaatatataaagcatttgact
tgttctatgccctagttattaatagtaatcaattacggggtcattagttcatagcccatata
tggagttccgcgttacataacttacggtaaatggcccgcctggctgaccgcccaacgacccc
cgcccattgacgtcaataatgacgtatgttcccatagtaacgccaatagggactttccattg
acgtcaatgggtggagtatttacggtaaactgcccacttggcagtacatcaagtgtatcata
tgccaagtacgccccctattgacgtcaatgacggtaaatggcccgcctggcattatgcccag
tacatgaccttatgggactttcctacttggcagtacatctacgtattagtcatcgctattac
catggtgatgcggttttggcagtacatcaatgggcgtggatagcggtttgactcacggggat
ttccaagtctccaccccattgacgtcaatgggagtttgttttggcaccaaaatcaacgggac
tttccaaaatgtcgtaacaactccgccccattgacgcaaatgggcggtaggcgtgtacggtg
ggaggtctatataagcagagctcaataaaagagcccacaacccctcactcggcgcgccagtc
ctccgattgactgagtcgcccgggtacccgtgtatccaataaaccctcttgcagttgcatcc
gacttgtggtctcgctgttccttgggagggtctcctctgagtgattgactacccgtcagcgg
gggtctttcatttgggggctcgtccgggatcgggagacccctgcccagggaccaccgaccca
ccaccgggaggtaagctggccagcaacttatctgtgtctgtccgattgtctagtgtctatga
ctgattttatgcgcctgcgtcggtactagttagctaactagctctgtatctggcggacccgt
ggtggaactgacgagttcggaacacccggccgcaaccctgggagacgtcccagggacttcgg
gggccgtttttgtggcccgacctgagtccaaaaatcccgatcgttttggactctttggtgca
ccccccttagaggagggatatgtggttctggtaggagacgagaacctaaaacagttcccgcc
tccgtctgaatttttgctttcggtttgggaccgaagccgcgccgcgcgtcttgtctgctgca
gcatcgttctgtgttgtctctgtctgactgtgtttctgtatttgtctgaaaatatgggcccg
ggccagactgttaccactcccttaagtttgaccttaggtcactggaaagatgtcgagcggat
cgctcacaaccagtcggtagatgtcaagaagagacgttgggttaccttctgctctgcagaat
ggccaacctttaacgtcggatggccgcgagacggcacctttaaccgagacctcatcacccag
gttaagatcaaggtcttttcacctggcccgcatggacacccagaccaggtcccctacatcgt
gacctgggaagccttggcttttgacccccctccctgggtcaagccctttgtacaccctaagc
ctccgcctcctcttcctccatccgccccgtctctcccccttgaacctcctcgttcgaccccg
cctcgatcctccctttatccagccctcactccttctctaggcgcccccatatggccatatga
gatcttatatggggcacccccgccccttgtaaacttccctgaccctgacatgacaagagtta
ctaacagcccctctctccaagctcacttacaggctctctacttagtccagcacgaagtctgg
agacctctggcggcagcctaccaagaacaactggaccgaccggtggtacctcacccttaccg
agtcggcgacacagtgtgggtccgccgacaccagactaagaacctagaacctcgctggaaag
gaccttacacagtcctgctgaccacccccaccgccctcaaagtagacggcatcgcagcttgg
atacacgccgcccacgtgaaggctgccgaccccgggggtggaccatcctctagactgccgga
tccaagctggaggaaaaactgtttcatacagaaggcgtggaggaaaaactgtttcatacaga
aggcgtggaggaaaaactgtttcatacagaaggcgtggaggaaaaactgtttcatacagaag
gcgtcgcgaattcgcggagactctagagggtatataatggaagctcgatttccagcttggca
ttccggtactgttggtaaacaccaagctatgaccgagtacaagcccacggtgcgcctcgcca
cccgcgacgacgtccccagggccgtacgcaccctcgccgccgcgttcgccgactaccccgcc
acgcgccacaccgtcgatccggaccgccacatcgagcgggtcaccgagctgcaagaactctt
cctcacgcgcgtcgggctcgacatcggcaaggtgtgggtcgcggacgacggcgccgccgtgg
cggtctggaccacgccggagagcgtcgaagcgggggcggtgttcgccgagatcggcccgcgc
atggccgagttgagcggttcccggctggccgcgcagcaacagatggaaggcctcctggcgcc
gcaccggcccaaggagcccgcgtggttcctggccaccgtcggcgtttcgcccgaccaccagg
gcaagggtctgggcagcgccgtcgtgctccccggagtggaggcggccgagcgcgccggggtg
cccgccttcctggagacctccgcgccccgcaacctccccttctacgagcggctcggcttcac
cgtcaccgccgacgtcgaggtgcccgaaggaccgcgcacctggtgcatgacccgcaagcccg
gtgccgctagccgggccaagcggtccggatccggacagtgcaccaactatgcgctgctgaaa
ctggcgggcgatgtggaaagcaacccgggcccgatggcttcgtacccctgccatcaacacgc
gtctgcgttcgaccaggctgcgcgttctcgcggccatagcaaccgacgtacggcgttgcgcc
ctcgccggcagcaagaagccacggaagtccgcctggagcagaaaatgcccacgctactgcgg
gtttatatagacggtcctcacgggatggggaaaaccaccaccacgcaactgctggtggccct
gggttcgcgcgacgatatcgtctacgtacccgagccgatgacttactggcaggtgctggggg
cttccgagacaatcgcgaacatctacaccacacaacaccgcctcgaccagggtgagatatcg
gccggggacgcggcggtggtaatgacaagcgcccagataacaatgggcatgccttatgccgt
gaccgacgccgttctggctcctcatatcgggggggaggctgggagctcacatgccccgcccc
cggccctcaccctcatcttcgaccgccatcccatcgccgccctcctgtgctacccggccgcg
cgataccttatgggcagcatgaccccccaggccgtgctggcgttcgtggccctcatcccgcc
gaccttgcccggcacaaacatcgtgttgggggcccttccggaggacagacacatcgaccgcc
tggccaaacgccagcgccccggcgagcggcttgacctggctatgctggccgcgattcgccgc
gtttacgggctgcttgccaatacggtgcggtatctgcagggcggcgggtcgtggcgggagga
ttggggacagctttcggggacggccgtgccgccccagggtgccgagccccagagcaacgcgg
gcccacgaccccatatcggggacacgttatttaccctgtttcgggcccccgagttgctggcc
cccaacggcgacctgtacaacgtgtttgcctgggccttggacgtcttggccaaacgcctccg
tcccatgcacgtctttatcctggattacgaccaatcgcccgccggctgccgggacgccctgc
tgcaacttacctccgggatggtccagacccacgtcaccacccccggctccataccgacgatc
tgcgacctggcgcgcacgtttgcccgggagatgggggaggctaaccgcgccaagcgctcggg
ttcgggtgccaccaacttcagcctgctgaagcaggccggcgacgtggaggagaaccccggcc
ccatggtgagcgagctgattaaggagaacatgcacatgaagctgtacatggagggcaccgtg
aacaaccaccacttcaagtgcacatccgagggcgaaggcaagccctacgagggcacccagac
catgagaatcaaggcggtcgagggcggccctctccccttcgccttcgacatcctggctacca
gcttcatgtacggcagcaaaaccttcatcaaccacacccagggcatccccgacttctttaag
cagtccttccccgagggcttcacatgggagagagtcaccacatacgaagacgggggcgtgct
gaccgctacccaggacaccagcctccaggacggctgcctcatctacaacgtcaagatcagag
gggtgaacttcccatccaacggccctgtgatgcagaagaaaacactcggctgggaggcctcc
accgagaccctgtaccccgctgacggcggcctggaaggcagagccgacatggccctgaagct
cgtgggcgggggccacctgatctgcaacttgaagaccacatacagatccaagaaacccgcta
agaacctcaagatgcccggcgtctactatgtggacagaagactggaaagaatcaaggaggcc
gacaaagagacctacgtcgagcagcacgaggtggctgtggccagatactgcgacctccctag
caaactggggcacagataa

Lengthy table referenced here
US20260125465A1-20260507-T00001
Please refer to the end of the specification for access instructions.

Lengthy table referenced here
US20260125465A1-20260507-T00002
Please refer to the end of the specification for access instructions.

Lengthy table referenced here
US20260125465A1-20260507-T00003
Please refer to the end of the specification for access instructions.

Lengthy table referenced here
US20260125465A1-20260507-T00004
Please refer to the end of the specification for access instructions.

Lengthy table referenced here
US20260125465A1-20260507-T00005
Please refer to the end of the specification for access instructions.

Lengthy table referenced here
US20260125465A1-20260507-T00006
Please refer to the end of the specification for access instructions.

Lengthy table referenced here
US20260125465A1-20260507-T00007
Please refer to the end of the specification for access instructions.

Lengthy table referenced here
US20260125465A1-20260507-T00008
Please refer to the end of the specification for access instructions.

Lengthy table referenced here
US20260125465A1-20260507-T00009
Please refer to the end of the specification for access instructions.

Lengthy table referenced here
US20260125465A1-20260507-T00010
Please refer to the end of the specification for access instructions.

Lengthy table referenced here
US20260125465A1-20260507-T00011
Please refer to the end of the specification for access instructions.

Lengthy table referenced here
US20260125465A1-20260507-T00012
Please refer to the end of the specification for access instructions.

Lengthy table referenced here
US20260125465A1-20260507-T00013
Please refer to the end of the specification for access instructions.

Lengthy table referenced here
US20260125465A1-20260507-T00014
Please refer to the end of the specification for access instructions.

Lengthy table referenced here
US20260125465A1-20260507-T00015
Please refer to the end of the specification for access instructions.

Lengthy table referenced here
US20260125465A1-20260507-T00016
Please refer to the end of the specification for access instructions.

Lengthy table referenced here
US20260125465A1-20260507-T00017
Please refer to the end of the specification for access instructions.

Lengthy table referenced here
US20260125465A1-20260507-T00018
Please refer to the end of the specification for access instructions.

Lengthy table referenced here
US20260125465A1-20260507-T00019
Please refer to the end of the specification for access instructions.

Lengthy table referenced here
US20260125465A1-20260507-T00020
Please refer to the end of the specification for access instructions.

Lengthy table referenced here
US20260125465A1-20260507-T00021
Please refer to the end of the specification for access instructions.

Lengthy table referenced here
US20260125465A1-20260507-T00022
Please refer to the end of the specification for access instructions.

Lengthy table referenced here
US20260125465A1-20260507-T00023
Please refer to the end of the specification for access instructions.

Lengthy table referenced here
US20260125465A1-20260507-T00024
Please refer to the end of the specification for access instructions.

Lengthy table referenced here
US20260125465A1-20260507-T00025
Please refer to the end of the specification for access instructions.

### OTHER EMBODIMENTS

[0276] From the foregoing description, it will be apparent that variations and modifications may be made to the various aspects and embodiments described herein to adapt it to various usages and conditions. Such embodiments are also within the scope of the following claims.

[0277] The recitation of a listing of elements in any definition of a variable herein includes definitions of that variable as any single element or combination (or subcombination) of listed elements. The recitation of an embodiment herein includes that embodiment as any single embodiment or in combination with any other embodiments or portions thereof.

[0278] All patents and publications mentioned in this specification are herein incorporated by reference to the same extent as if each independent patent and publication was specifically and individually indicated to be incorporated by reference.

LENGTHY TABLES
The patent application contains a lengthy table section. A copy of the table is available in electronic form from the USPTO web site (https://seqdata.uspto.gov/docdetail?docId=US20260125465A1). An electronic copy of the table will also be available from the USPTO upon request and payment of the fee set forth in 37 CFR 1.19(b)(3).

The application's sequence listing, which the Patent Office published only in electronic form, follows.

SEQUENCE LISTING (4476 sequences)

SEQ ID NO: 1 - protein, 8 aa, synthetic construct
GRTFSSYA

SEQ ID NO: 2 - protein, 8 aa, synthetic construct
ICWSGGNT

SEQ ID NO: 3 - protein, 14 aa, synthetic construct
NERTTVLPTGAMDY

SEQ ID NO: 4 - protein, 8 aa, synthetic construct
GSMFSINA

SEQ ID NO: 5 - protein, 7 aa, synthetic construct
MTSGGST

SEQ ID NO: 6 - protein, 10 aa, synthetic construct
NGGWSLAMDY

SEQ ID NO: 7 - protein, 8 aa, synthetic construct
GFTLDYYA

SEQ ID NO: 8 - protein, 8 aa, synthetic construct
ISSSGGST

SEQ ID NO: 9 - protein, 12 aa, synthetic construct
AAAGGYGNSSRY

SEQ ID NO: 10 - protein, 8 aa, synthetic construct
GSIFSVNA

SEQ ID NO: 11 - protein, 8 aa, synthetic construct
INTGGGST

SEQ ID NO: 12 - protein, 11 aa, synthetic construct
AAEDFGNSKTY

SEQ ID NO: 13 - protein, 8 aa, synthetic construct
GFPYFSCC

SEQ ID NO: 14 - protein, 7 aa, synthetic construct
ISSDGST

SEQ ID NO: 15 - protein, 15 aa, synthetic construct
AASPRQLGPYYAMDY

SEQ ID NO: 16 - protein, 8 aa, synthetic construct
GFTLDNYA

SEQ ID NO: 17 - protein, 10 aa, synthetic construct
AGVGDYGRRA

SEQ ID NO: 18 - protein, 8 aa, synthetic construct
GFTFDDSD

SEQ ID NO: 19 - protein, 9 aa, synthetic construct
RTMASRIGC

SEQ ID NO: 20 - protein, 25 aa, synthetic construct
  VARIANT 1: note = E, D, or Q
  VARIANT 2: note = V or L
  VARIANT 11: note = L or S
  VARIANT 14: note = A or P
  VARIANT 16: note = E or G
  VARIANT 17: note = S or T
  VARIANT 21: note = S or T
  VARIANT 23: note = A, T, or V
XXQLVESGGGXVQXGXXLRLXCXAS

SEQ ID NO: 21 - protein, 38 aa, synthetic construct
  VARIANT 1: note = F, H, I, N, or Y
  VARIANT 4: note = A or D
  VARIANT 5: note = S or T
  VARIANT 7: note = K or R
  VARIANT 12: note = I or V
  VARIANT 14: note = G, K, R, Q, or W
  VARIANT 15: note = D or G
  VARIANT 16: note = N or T
  VARIANT 18: note = K, N, or R
  VARIANT 19: note = N, H, or Q
  VARIANT 20: note = T or S
  VARIANT 21: note = V or L
  VARIANT 22: note = F or Y
  VARIANT 26: note = N, S, or T
  VARIANT 30: note = P or S
  VARIANT 34: note = A or G
  VARIANT 35: note = I or V
  VARIANT 37: note = F, I, S, or Y
XYAXXVXGRFTXSXXXAXXXXXLQMXSLKXEDTXXYXC

SEQ ID NO: 22 - protein, 11 aa, synthetic construct
  VARIANT 1: note = M or W
  VARIANT 6: note = L or S
  VARIANT 10: note = S or absent
  VARIANT 11: note = S or absent
XGQGTXVTVXX

SEQ ID NO: 23 - protein, 363 aa, synthetic construct
MLRLLLALNLFPSIQVTGGQVQLVESGGGLVQPGGSLRLSCAASGSMFSINAVAWYRQAPGEQREPVAAMTSGGSTIYADSVKGRFTISRDNAKNTVYLQMSSLKPEDTAVYYCNGGWSLAMDYWGQGTSVTVSPTPAPTIASQPLSLRPEACRPAAGGAVHTRGLDFACDPSKPFWVLVVVGGVLACYSLLVTVAFIIFWVRKRGRKKLLYIFKQPFMRPVQTTQEEDGCSCRFPEEEEGGCELASLRVKFSRSADAPAYQQGQNQLYNELNLGRREEYDVLDKRRGRDPEMGGKPQRRKNPQEGLYNELQKDKMAEAYSEIGMKGERRRGKGHDGLYQGLSTATKDTYDALHMQALPPRAS

SEQ ID NO: 24 - protein, 365 aa, synthetic construct
MLRLLLALNLFPSIQVTGGQVQLVESGGGLVQPGGSLRLSCAASGSIFSVNAMGYYRQISTKQRNLVAAINTGGGSTYYADSVKGRFTISWDNANNTLFLQMNSLKSEDTAVYYCAAEDFGNSKTYWGQGTLVTVSPTPAPTIASQPLSLRPEACRPAAGGAVHTRGLDFACDPSKPFWVLVVVGGVLACYSLLVTVAFIIFWVRKRGRKKLLYIFKQPFMRPVQTTQEEDGCSCRFPEEEEGGCELASLRVKFSRSADAPAYQQGQNQLYNELNLGRREEYDVLDKRRGRDPEMGGKPQRRKNPQEGLYNELQKDKMAEAYSEIGMKGERRRGKGHDGLYQGLSTATKDTYDALHMQALPPRAS

SEQ ID NO: 25 - protein, 368 aa, synthetic construct
MLRLLLALNLFPSIQVTGGDVQLVESGGGLVQAGGSLRLSCAASGFPYFSCCMSWHRQAPGKDRELVSSISSDGSTHYADSVRGRFTISKGNARNTLYLQMNSLKPEDTAVYFCAASPRQLGPYYAMDYWGQGTSVTVSPTPAPTIASQPLSLRPEACRPAAGGAVHTRGLDFACDPSKPFWVLVVVGGVLACYSLLVTVAFIIFWVRKRGRKKLLYIFKQPFMRPVQTTQEEDGCSCRFPEEEEGGCELASLRVKFSRSADAPAYQQGQNQLYNELNLGRREEYDVLDKRRGRDPEMGGKPQRRKNPQEGLYNELQKDKMAEAYSEIGMKGERRRGKGHDGLYQGLSTATKDTYDALHMQALPPRAS

SEQ ID NO: 26 - protein, 364 aa, synthetic construct
MLRLLLALNLFPSIQVTGGQLQLVESGGGLVQPGGSLRLSCAASGFTLDNYAIGWFRQAPGKEREGVSSISSSGGSTNYADSVKGRFTVSRDNAKHTVYLQMNSLKPEDTAVYYCAGVGDYGRRAMGQGTSVTVSPTPAPTIASQPLSLRPEACRPAAGGAVHTRGLDFACDPSKPFWVLVVVGGVLACYSLLVTVAFIIFWVRKRGRKKLLYIFKQPFMRPVQTTQEEDGCSCRFPEEEEGGCELASLRVKFSRSADAPAYQQGQNQLYNELNLGRREEYDVLDKRRGRDPEMGGKPQRRKNPQEGLYNELQKDKMAEAYSEIGMKGERRRGKGHDGLYQGLSTATKDTYDALHMQALPPRAS

SEQ ID NO: 27 - protein, 366 aa, synthetic construct
MLRLLLALNLFPSIQVTGGQLQLVESGGGLVQPGGSLRLSCAASGFTLDYYAIGWFRQAPGKEREGVSYISSSGGSTNYADSVKGRFTISRDNAKNTVYLQMNSLKPEDTGVYSCAAAGGYGNSSRYWGQGTSVTVSPTPAPTIASQPLSLRPEACRPAAGGAVHTRGLDFACDPSKPFWVLVVVGGVLACYSLLVTVAFIIFWVRKRGRKKLLYIFKQPFMRPVQTTQEEDGCSCRFPEEEEGGCELASLRVKFSRSADAPAYQQGQNQLYNELNLGRREEYDVLDKRRGRDPEMGGKPQRRKNPQEGLYNELQKDKMAEAYSEIGMKGERRRGKGHDGLYQGLSTATKDTYDALHMQALPPRAS

SEQ ID NO: 28 - protein, 362 aa, synthetic construct
MLRLLLALNLFPSIQVTGGEVQLVESGGGSVQAGETLRLSCTASGFTFDDSDMGWYRQAPGDECELVSTISSDGSTNYADSVKGRFTISQDNAKNTVYLQMTSLKPEDTAIYSCRTMASRIGCWGQGTLVTVSPTPAPTIASQPLSLRPEACRPAAGGAVHTRGLDFACDPSKPFWVLVVVGGVLACYSLLVTVAFIIFWVRKRGRKKLLYIFKQPFMRPVQTTQEEDGCSCRFPEEEEGGCELASLRVKFSRSADAPAYQQGQNQLYNELNLGRREEYDVLDKRRGRDPEMGGKPQRRKNPQEGLYNELQKDKMAEAYSEIGMKGERRRGKGHDGLYQGLSTATKDTYDALHMQALPPRAS

SEQ ID NO: 29 - protein, 369 aa, synthetic construct
MLRLLLALNLFPSIQVTGGQVQLVESGGGLVQAGGSLRLSCVASGRTFSSYAMGWFRQSPGKEREFVAAICWSGGNTYYADSVKGRFTISGDNAKNSVYLQMNSLKPEDTAVYICNERTTVLPTGAMDYWGQGTSVTVSSPTPAPTIASQPLSLRPEACRPAAGGAVHTRGLDFACDPSKPFWVLVVVGGVLACYSLLVTVAFIIFWVRKRGRKKLLYIFKQPFMRPVQTTQEEDGCSCRFPEEEEGGCELASLRVKFSRSADAPAYQQGQNQLYNELNLGRREEYDVLDKRRGRDPEMGGKPQRRKNPQEGLYNELQKDKMAEAYSEIGMKGERRRGKGHDGLYQGLSTATKDTYDALHMQALPPRAS

SEQ ID NO: 30 - protein, 5 aa, synthetic construct
SYAMG

SEQ ID NO: 31 - protein, 17 aa, synthetic construct
AICWSGGNTYYADSVKG

SEQ ID NO: 32 - protein, 12 aa, synthetic construct
RTTVLPTGAMDY

SEQ ID NO: 33 - protein, 5 aa, synthetic construct
INAVA

SEQ ID NO: 34 - protein, 16 aa, synthetic construct
AMTSGGSTIYADSVKG

SEQ ID NO: 35 - protein, 8 aa, synthetic construct
GWSLAMDY

SEQ ID NO: 36 - protein, 5 aa, synthetic construct
YYAIG

SEQ ID NO: 37 - protein, 17 aa, synthetic construct
YISSSGGSTNYADSVKG

SEQ ID NO: 38 - protein, 10 aa, synthetic construct
AGGYGNSSRY

SEQ ID NO: 39 - protein, 5 aa, synthetic construct
VNAMG

SEQ ID NO: 40 - protein, 17 aa, synthetic construct
AINTGGGSTYYADSVKG

SEQ ID NO: 41 - protein, 9 aa, synthetic construct
EDFGNSKTY

SEQ ID NO: 42 - protein, 5 aa, synthetic construct
SCCMS

SEQ ID NO: 43 - protein, 16 aa, synthetic construct
SISSDGSTHYADSVRG

SEQ ID NO: 44 - protein, 13 aa, synthetic construct
SPRQLGPYYAMDY

SEQ ID NO: 45 - protein, 5 aa, synthetic construct
NYAIG

SEQ ID NO: 46 - protein, 17 aa, synthetic construct
SISSSGGSTNYADSVKG

SEQ ID NO: 47 - protein, 8 aa, synthetic construct
VGDYGRRA

SEQ ID NO: 48 - protein, 5 aa, synthetic construct
DSDMG

SEQ ID NO: 49 - protein, 16 aa, synthetic construct
TISSDGSTNYADSVKG

SEQ ID NO: 50 - protein, 7 aa, synthetic construct
MASRIGC

SEQ ID NO: 51 - protein, 5 aa, synthetic construct
YFAIG

SEQ ID NO: 52 - protein, 17 aa, synthetic construct
YISSSGDSTNYADTVKG

SEQ ID NO: 53 - protein, 5 aa, synthetic construct
SYPMG

SEQ ID NO: 54 - protein, 17 aa, synthetic construct
AISWSGGRTFYAASVKG

SEQ ID NO: 55 - protein, 121 aa, synthetic construct
QVQLVESGGGLVQAGGSLRLSCVASGRTFSSYAMGWFRQSPGKEREFVAAICWSGGNTYYADSVKGRFTISGDNAKNSVYLQMNSLKPEDTAVYICNERTTVLPTGAMDYWGQGTSVTVSS

SEQ ID NO: 56 - protein, 115 aa, synthetic construct
QVQLVESGGGLVQPGGSLRLSCAASGSMFSINAVAWYRQAPGEQREPVAAMTSGGSTIYADSVKGRFTISRDNAKNTVYLQMSSLKPEDTAVYYCNGGWSLAMDYWGQGTSVTVS

SEQ ID NO: 57 - protein, 118 aa, synthetic construct
QLQLVESGGGLVQPGGSLRLSCAASGFTLDYYAIGWFRQAPGKEREGVSYISSSGGSTNYADSVKGRFTISRDNAKNTVYLQMNSLKPEDTGVYSCAAAGGYGNSSRYWGQGTSVTVS

SEQ ID NO: 58 - protein, 117 aa, synthetic construct
QVQLVESGGGLVQPGGSLRLSCAASGSIFSVNAMGYYRQISTKQRNLVAAINTGGGSTYYADSVKGRFTISWDNANNTLFLQMNSLKSEDTAVYYCAAEDFGNSKTYWGQGTLVTVS

SEQ ID NO: 59 - protein, 120 aa, synthetic construct
DVQLVESGGGLVQAGGSLRLSCAASGFPYFSCCMSWHRQAPGKDRELVSSISSDGSTHYADSVRGRFTISKGNARNTLYLQMNSLKPEDTAVYFCAASPRQLGPYYAMDYWGQGTSVTVS

SEQ ID NO: 60 - protein, 116 aa, synthetic construct
QLQLVESGGGLVQPGGSLRLSCAASGFTLDNYAIGWFRQAPGKEREGVSSISSSGGSTNYADSVKGRFTVSRDNAKHTVYLQMNSLKPEDTAVYYCAGVGDYGRRAMGQGTSVTVS

SEQ ID NO: 61 - protein, 114 aa, synthetic construct
EVQLVESGGGSVQAGETLRLSCTASGFTFDDSDMGWYRQAPGDECELVSTISSDGSTNYADSVKGRFTISQDNAKNTVYLQMTSLKPEDTAIYSCRTMASRIGCWGQGTLVTVS

SEQ ID NO: 62 - protein, 116 aa, synthetic construct
QLQLVESGGGLVQPGGSLRLSCAASGFTLDNYAIGWFRQAPGKEREGVSSISSSGGSTNYADSVKGRFTVSRDNAKQTVYLQMNSLKPEDTAVYYCAGVGDYGRRAMGQGTSVTVS

SEQ ID NO: 63 - protein, 118 aa, synthetic construct
QLQLVESGGGLVQPGGSLRLSCAASGFTLDYFAIGWFRQAPGKEREGVSYISSSGDSTNYADTVKGRFTISRDNAKNTVYLQMNSLKPEDTGVYSCAAAGGYGNSSRYWGQGTSVTVS

SEQ ID NO: 64 - protein, 116 aa, synthetic construct
QLQLVESGGGLVQPGGSLRLTCAASGFTLDNYAIGWFRQAPGKEREGVSSISSSGGSTNYADSVKGRFTVSRDNAKHTVYLQMNSLKPEDTAVYYCAGVGDYGRRAMGQGTSVTVS

SEQ ID NO: 65 - protein, 120 aa, synthetic construct
QVQLVESGGGLVQAGGSLRLSCAASGRNFSSYPMGWFRQAPGKEREFVAAISWSGGRTFYAASVKGRFTISRDTAKNSVYLQMNSLKPEDTAVYICNERTTVLPTGAMDYWGQGTSVTVS

SEQ ID NO: 66 - protein, 115 aa, synthetic construct
QVQLVESGGGLVQPGGSLRLSCAASGSMFSINAVAWYRQAPGEQREPVAAMTSGGSTIYADSVKGRFTISRDNAKNTVYLQMNSLKPEDTAVYYCNGGWSLAMDYWGQGTSVTVS

SEQ ID NO: 67 - protein, 30 aa, synthetic construct
  VARIANT 1: note = E, D, or Q
  VARIANT 2: note = V or L
  VARIANT 11: note = L or S
  VARIANT 14: note = A or P
  VARIANT 16: note = E or G
  VARIANT 17: note = S or T
  VARIANT 21: note = S or T
  VARIANT 23: note = A, T, or V
  VARIANT 27: note = F, R, or S
  VARIANT 28: note = I, M, P, or T
  VARIANT 29: note = F, L, or Y
  VARIANT 30: note = D, F, or S
XXQLVESGGGXVQXGXXLRLXCXASGXXXX

SEQ ID NO: 68 - protein, 32 aa, synthetic construct
  VARIANT 4: note = I or V
  VARIANT 6: note = G, K, R, Q, or W
  VARIANT 7: note = D or G
  VARIANT 8: note = N or T
  VARIANT 10: note = K, N, or R
  VARIANT 11: note = N, H, or Q
  VARIANT 12: note = T or S
  VARIANT 13: note = V or L
  VARIANT 14: note = F or Y
  VARIANT 18: note = N, S, or T
  VARIANT 22: note = P or S
  VARIANT 26: note = A or G
  VARIANT 27: note = I or V
  VARIANT 29: note = F, I, S, or Y
  VARIANT 31: note = A, N, or R
  VARIANT 32: note = A, E, G, T, or Y
RFTXSXXXAXXXXXLQMXSLKXEDTXXYXCXX

SEQ ID NO: 69 - DNA, 363 bp, synthetic construct
  source 1..363: mol_type = other DNA
caagttcagcttgtggagtcaggcggtggactcgttcaagccggaggctcactgcggttgtcttgtgtcgcatctggtcgaaccttctcaagttatgctatggggtggttccgccagtctcctggtaaagagcgggaatttgtcgcagcaatttgttggtctggtggtaacacttactatgctgattcagtaaaaggtcgattcaccatatcaggggataatgcaaaaaattctgtctatctccaaatgaactctctgaagcctgaagatactgctgtgtatatctgtaatgagaggactacggtactacctacgggtgctatggactactggggtcaagggacctcagtcaccgtctcctcg

SEQ ID NO: 70 - DNA, 345 bp, synthetic construct
  source 1..345: mol_type = other DNA
caagttcagcttgtcgagagtggtggaggattggtgcagccaggcggatctctcagactttcctgcgccgccagtggttctatgttttccataaatgcagtggcctggtacaggcaagcaccaggcgagcaaagggaaccggtagccgcaatgacctctggaggtagtacaatttacgctgatagcgtcaagggacgattcacaatatcacgagacaatgccaagaacactgtctaccttcaaatgagcagtttgaaacctgaggatacagcagtatactactgcaatggaggatggtcactggctatggactactggggtcaaggaacctcagtcaccgtctcc

SEQ ID NO: 71 - DNA, 354 bp, synthetic construct
  source 1..354: mol_type = other DNA
cagcttcaactggtagagagtggtggaggacttgttcagcctggagggtcccttagacttagttgcgctgccagtgggttcaccctggactactacgccattggctggtttcgacaggccccagggaaagagcgagagggggtctcttacatcagtagttccggtggttccactaactacgctgatagtgtgaaggggaggtttactatttctcgggataatgcaaaaaataccgtgtacctgcaaatgaatagcctcaaaccagaagacacaggcgtttattcttgcgcagcagctgggggctatggtaactcctctcgctactggggtcaaggaacctcagtcaccgtctcc

SEQ ID NO: 72 - DNA, 351 bp, synthetic construct
  source 1..351: mol_type = other DNA
caggttcagctggtggagtccggcggaggtcttgttcagcccggaggttccctgcgcctctcttgtgcagcttctggttccattttctcagtcaatgcaatgggctactacagacaaatttccacaaagcagcgcaacttggtcgccgcaataaatactggtggtggctcgacttattacgccgatagtgtcaaaggacgatttactataagttgggacaacgcaaacaatactttgttcctccaaatgaatagcctcaaatcagaagacactgccgtctactactgtgcagcagaggactttggtaactcgaaaacttactggggccaagggactctggtcactgtctct

SEQ ID NO: 73 - DNA, 360 bp, synthetic construct
  source 1..360: mol_type = other DNA
gacgtacaacttgtggaatcaggtgggggtctcgttcaagctggtgggtcactgcggctttcttgcgctgcaagtgggttcccttatttttcctgctgtatgagctggcatcgccaagctcctggaaaagatcgggaactggtctccagtatttcatctgacgggtcaacacattacgctgatagcgtcagggggaggtttactatttctaaaggaaatgcaagaaacacactctacctccagatgaacagtctgaagcccgaagacaccgccgtgtatttctgtgcagcttcccctagacagctcgggccttactatgctatggactactggggtcaaggaacctcagtcaccgtctcc

SEQ ID NO: 74 - DNA, 348 bp, synthetic construct
  source 1..348: mol_type = other DNA
cagcttcaactggtagagagtggtggaggacttgttcagcctggagggtcccttagacttagttgcgctgccagtgggttcaccctggacaactacgccattggctggtttcgacaggccccagggaaagagcgagagggggtctctagcatcagtagttccggtggttccaccaactatgctgatagtgtgaaggggaggtttactgtttctcgggataatgcaaaacataccgtgtacctgcaaatgaatagcctcaaaccagaagacacagccgtctattattgcgcaggagttggggactacggtagaagggcgatgggtcaaggcacctcagtcaccgtctcc

SEQ ID NO: 75 - DNA, 342 bp, synthetic construct
  source 1..342: mol_type = other DNA
gaagttcagcttgttgaatcaggcggcggaagtgtccaagctggcgaaacccttcggctctcctgcaccgcatccggcttcacattcgatgattcagatatgggctggtacaggcaggctcctggtgacgaatgtgagctggtatccacaatctccagcgatggcagcacaaattatgctgactctgttaaagggcgatttaccatctctcaagataacgcaaagaacaccgtgtatctgcagatgacctcattgaagccagaggatactgccatatattcatgcagaacaatggcctcgaggattggttgctggggccaagggactctggtcactgtctct

SEQ ID NO: 76 - DNA, 348 bp, synthetic construct
  source 1..348: mol_type = other DNA
cagcttcaactggtagagagtggtggaggacttgttcagcctggagggtcccttagacttagttgcgctgccagtggattcaccctggacaactacgccattggctggtttcgacaggccccagggaaagagcgagagggggtctctagtatcagtagttccggtggttccaccaactatgccgatagtgtgaaggggaggtttactgtttctcgggataatgcaaaacaaaccgtgtacctgcaaatgaatagcctcaaaccagaagacacagccgtctattattgcgcaggagttggggactacggtagaagggcgatgggtcaaggcacctcagtcaccgtctcc

SEQ ID NO: 77 - DNA, 354 bp, synthetic construct
  source 1..354: mol_type = other DNA
cagcttcaactggtagagagtggtggaggacttgttcagcctggagggtcccttagacttagttgcgctgccagtgggttcaccctggactacttcgccattggctggtttcgacaggccccagggaaagagcgagagggggtctcttacatcagtagttccggtgattccactaactacgctgatactgtgaaggggaggtttactatttctcgggataatgcaaaaaataccgtgtacctgcaaatgaatagcctcaaaccagaagacacaggcgtttattcttgcgcagcagctgggggctatggtaactcctctcgctactggggtcaaggaacctcagtcaccgtctcc

SEQ ID NO: 78 - DNA, 348 bp, synthetic construct
  source 1..348: mol_type = other DNA
cagcttcaactggtagagagtggtggaggacttgttcagcctggagggtcccttagacttacttgcgctgccagtgggttcaccctggacaactacgccattggctggtttcgacaggccccagggaaagagcgagagggggtctctagcatcagtagttccggtggttccaccaactatgctgatagtgtgaaggggaggtttactgtttctcgggataatgcaaaacataccgtgtacctgcaaatgaatagcctcaaaccagaagacacagccgtctattattgcgcaggagttggggactacggtagaagggcgatgggtcaaggcacctcagtcaccgtctcc

SEQ ID NO: 79 - DNA, 345 bp, synthetic construct
  source 1..345: mol_type = other DNA
caagtccagctcgtcgagagtggtggaggattggtgcagccaggcggatctctcagactttcctgcgccgccagtggttctatgttttccataaatgcagtggcctggtacaggcaagcaccaggcgagcaaagggaaccggtagccgcaatgacctctggaggtagtacaatttacgctgatagcgtcaagggacgattcacaatatcacgagacaatgccaagaacactgtctaccttcaaatgaacagtttgaaacctgaggatacagcagtatactactgcaatggaggatggtcactggctatggactactggggtcaaggaacctcagtcaccgtctcc

SEQ ID NO: 80 - DNA, 1089 bp, synthetic construct
  source 1..1089: mol_type = other DNA
atgctcaggctgctcttggctctcaacttattcccttcaattcaagtaacaggagggcaagttcagcttgtcgagagtggtggaggattggtgcagccaggcggatctctcagactttcctgcgccgccagtggttctatgttttccataaatgcagtggcctggtacaggcaagcaccaggcgagcaaagggaaccggtagccgcaatgacctctggaggtagtacaatttacgctgatagcgtcaagggacgattcacaatatcacgagacaatgccaagaacactgtctaccttcaaatgagcagtttgaaacctgaggatacagcagtatactactgcaatggaggatggtcactggctatggactactggggtcaaggaacctcagtcaccgtctccccgacgccagcgccaactattgcgagtcagcctctcagtctgcgacctgaggcttgtcgaccagcagccggaggcgcagtgcacacgagggggctggacttcgcctgtgatccttctaagcccttttgggtgctggtggtggttggtggagtcctggcttgctatagcttgctagtaacagtggcctttattattttctgggtgaggaaacggggcagaaagaaactcctgtatatattcaaacaaccatttatgagaccagtacaaactactcaagaggaagatggctgtagctgccgatttccagaagaagaagaaggaggatgtgaactggctagcctgagagtgaagttcagcaggagcgcagacgcccccgcgtaccagcagggccagaaccagctctataacgagctcaatctaggacgaagagaggagtacgatgttttggacaagagacgtggccgggaccctgagatggggggaaagccgcagagaaggaagaaccctcaggaaggcctgtacaatgaactgcagaaagataagatggcggaggcctacagtgagattgggatgaaaggcgagcgccggaggggcaaggggcacgatggcctttaccagggtctcagtacagccaccaaggacacctacgacgcccttcacatgcaggccctgccccctcgcgctagc

SEQ ID NO: 81 - DNA, 1095 bp, synthetic construct
  source 1..1095: mol_type = other DNA
atgctcaggctgctcttggctctcaacttattcccttcaattcaagtaacaggagggcaggttcagctggtggagtccggcggaggtcttgttcagcccggaggttccctgcgcctctcttgtgcagcttctggttccattttctcagtcaatgcaatgggctactacagacaaatttccacaaagcagcgcaacttggtcgccgcaataaatactggtggtggctcgacttattacgccgatagtgtcaaaggacgatttactataagttgggacaacgcaaacaatactttgttcctccaaatgaatagcctcaaatcagaagacactgccgtctactactgtgcagcagaggactttggtaactcgaaaacttactggggccaagggactctggtcactgtctctccgacgccagcgccaactattgcgagtcagcctctcagtctgcgacctgaggcttgtcgaccagcagccggaggcgcagtgcacacgagggggctggacttcgcctgtgatccttctaagcccttttgggtgctggtggtggttggtggagtcctggcttgctatagcttgctagtaacagtggcctttattattttctgggtgaggaaacggggcagaaagaaactcctgtatatattcaaacaaccatttatgagaccagtacaaactactcaagaggaagatggctgtagctgccgatttccagaagaagaagaaggaggatgtgaactggctagcctgagagtgaagttcagcaggagcgcagacgcccccgcgtaccagcagggccagaaccagctctataacgagctcaatctaggacgaagagaggagtacgatgttttggacaagagacgtggccgggaccctgagatggggggaaagccgcagagaaggaagaaccctcaggaaggcctgtacaatgaactgcagaaagataagatggcggaggcctacagtgagattgggatgaaaggcgagcgccggaggggcaaggggcacgatggcctttaccagggtctcagtacagccaccaaggacacctacgacgcccttcacatgcaggccctgccccctcgcgctagc

SEQ ID NO: 82 - DNA, 1104 bp, synthetic construct
  source 1..1104: mol_type = other DNA
atgctcaggctgctcttggctctcaacttattcccttcaattcaagtaacaggaggggacgtacaacttgtggaatcaggtgggggtctcgttcaagctggtgggtcactgcggctttcttgcgctgcaagtgggttcccttatttttcctgctgtatgagctggcatcgccaagctcctggaaaagatcgggaactggtctccagtatttcatctgacgggtcaacacattacgctgatagcgtcagggggaggtttactatttctaaaggaaatgcaagaaacacactctacctccagatgaacagtctgaagcccgaagacaccgccgtgtatttctgtgcagcttcccctagacagctcgggccttactatgctatggactactggggtcaaggaacctcagtcaccgtctccccgacgccagcgccaactattgcgagtcagcctctcagtctgcgacctgaggcttgtcgaccagcagccggaggcgcagtgcacacgagggggctggacttcgcctgtgatccttctaagcccttttgggtgctggtggtggttggtggagtcctggcttgctatagcttgctagtaacagtggcctttattattttctgggtgaggaaacggggcagaaagaaactcctgtatatattcaaacaaccatttatgagaccagtacaaactactcaagaggaagatggctgtagctgccgatttccagaagaagaagaaggaggatgtgaactggctagcctgagagtgaagttcagcaggagcgcagacgcccccgcgtaccagcagggccagaaccagctctataacgagctcaatctaggacgaagagaggagtacgatgttttggacaagagacgtggccgggaccctgagatggggggaaagccgcagagaaggaagaaccctcaggaaggcctgtacaatgaactgcagaaagataagatggcggaggcctacagtgagattgggatgaaaggcgagcgccggaggggcaaggggcacgatggcctttaccagggtctcagtacagccaccaaggacacctacgacgcccttcacatgcaggccctgccccctcgcgctagc

SEQ ID NO: 83 - DNA, 1092 bp, synthetic construct
  source 1..1092: mol_type = other DNA
atgctcaggctgctcttggctctcaacttattcccttcaattcaagtaacaggagggcagcttcaactggtagagagtggtggaggacttgttcagcctggagggtcccttagacttagttgcgctgccagtgggttcaccctggacaactacgccattggctggtttcgacaggccccagggaaagagcgagagggggtctctagcatcagtagttccggtggttccaccaactatgctgatagtgtgaaggggaggtttactgtttctcgggataatgcaaaacataccgtgtacctgcaaatgaatagcctcaaaccagaagacacagccgtctattattgcgcaggagttggggactacggtagaagggcgatgggtcaaggcacctcagtcaccgtctccccgacgccagcgccaactattgcgagtcagcctctcagtctgcgacctgaggcttgtcgaccagcagccggaggcgcagtgcacacgagggggctggacttcgcctgtgatccttctaagcccttttgggtgctggtggtggttggtggagtcctggcttgctatagcttgctagtaacagtggcctttattattttctgggtgaggaaacggggcagaaagaaactcctgtatatattcaaacaaccatttatgagaccagtacaaactactcaagaggaagatggctgtagctgccgatttccagaagaagaagaaggaggatgtgaactggctagcctgagagtgaagttcagcaggagcgcagacgcccccgcgtaccagcagggccagaaccagctctataacgagctcaatctaggacgaagagaggagtacgatgttttggacaagagacgtggccgggaccctgagatggggggaaagccgcagagaaggaagaaccctcaggaaggcctgtacaatgaactgcagaaagataagatggcggaggcctacagtgagattgggatgaaaggcgagcgccggaggggcaaggggcacgatggcctttaccagggtctcagtacagccaccaaggacacctacgacgcccttcacatgcaggccctgccccctcgcgctagc

SEQ ID NO: 84 - DNA, 1098 bp, synthetic construct
  source 1..1098: mol_type = other DNA
atgctcaggctgctcttggctctcaacttattcccttcaattcaagtaacaggagggcagcttcaactggtagagagtggtggaggacttgttcagcctggagggtcccttagacttagttgcgctgccagtgggttcaccctggactactacgccattggctggtttcgacaggccccagggaaagagcgagagggggtctcttacatcagtagttccggtggttccactaactacgctgatagtgtgaaggggaggtttactatttctcgggataatgcaaaaaataccgtgtacctgcaaatgaatagcctcaaaccagaagacacaggcgtttattcttgcgcagcagctgggggctatggtaactcctctcgctactggggtcaaggaacctcagtcaccgtctccccgacgccagcgccaactattgcgagtcagcctctcagtctgcgacctgaggcttgtcgaccagcagccggaggcgcagtgcacacgagggggctggacttcgcctgtgatccttctaagcccttttgggtgctggtggtggttggtggagtcctggcttgctatagcttgctagtaacagtggcctttattattttctgggtgaggaaacggggcagaaagaaactcctgtatatattcaaacaaccatttatgagaccagtacaaactactcaagaggaagatggctgtagctgccgatttccagaagaagaagaaggaggatgtgaactggctagcctgagagtgaagttcagcaggagcgcagacgcccccgcgtaccagcagggccagaaccagctctataacgagctcaatctaggacgaagagaggagtacgatgttttggacaagagacgtggccgggaccctgagatggggggaaagccgcagagaaggaagaaccctcaggaaggcctgtacaatgaactgcagaaagataagatggcggaggcctacagtgagattgggatgaaaggcgagcgccggaggggcaaggggcacgatggcctttaccagggtctcagtacagccaccaaggacacctacgacgcccttcacatgcaggccctgccccctcgcgctagc

SEQ ID NO: 85 - DNA, 1086 bp, synthetic construct
  source 1..1086: mol_type = other DNA
atgctcaggctgctcttggctctcaacttattcccttcaattcaagtaacaggaggggaagttcagcttgttgaatcaggcggcggaagtgtccaagctggcgaaacccttcggctctcctgcaccgcatccggcttcacattcgatgattcagatatgggctggtacaggcaggctcctggtgacgaatgtgagctggtatccacaatctccagcgatggcagcacaaattatgctgactctgttaaagggcgatttaccatctctcaagataacgcaaagaacaccgtgtatctgcagatgacctcattgaagccagaggatactgccatatattcatgcagaacaatggcctcgaggattggttgctggggccaagggactctggtcactgtctctccgacgccagcgccaactattgcgagtcagcctctcagtctgcgacctgaggcttgtcgaccagcagccggaggcgcagtgcacacgagggggctggacttcgcctgtgatccttctaagcccttttgggtgctggtggtggttggtggagtcctggcttgctatagcttgctagtaacagtggcctttattattttctgggtgaggaaacggggcagaaagaaactcctgtatatattcaaacaaccatttatgagaccagtacaaactactcaagaggaagatggctgtagctgccgatttccagaagaagaagaaggaggatgtgaactggctagcctgagagtgaagttcagcaggagcgcagacgcccccgcgtaccagcagggccagaaccagctctataacgagctcaatctaggacgaagagaggagtacgatgttttggacaagagacgtggccgggaccctgagatggggggaaagccgcagagaaggaagaaccctcaggaaggcctgtacaatgaactgcagaaagataagatggcggaggcctacagtgagattgggatgaaaggcgagcgccggaggggcaaggggcacgatggcctttaccagggtctcagtacagccaccaaggacacctacgacgcccttcacatgcaggccctgccccctcgcgctagc

SEQ ID NO: 86 - DNA, 1107 bp, synthetic construct
  source 1..1107: mol_type = other DNA
atgctcaggctgctcttggctctcaacttattcccttcaattcaagtaacaggagggcaagttcagcttgtggagtcaggcggtggactcgttcaagccggaggctcactgcggttgtcttgtgtcgcatctggtcgaaccttctcaagttatgctatggggtggttccgccagtctcctggtaaagagcgggaatttgtcgcagcaatttgttggtctggtggtaacacttactatgctgattcagtaaaaggtcgattcaccatatcaggggataatgcaaaaaattctgtctatctccaaatgaactctctgaagcctgaagatactgctgtgtatatctgtaatgagaggactacggtactacctacgggtgctatggactactggggtcaagggacctcagtcaccgtctcctcgccgacgccagcgccaactattgcgagtcagcctctcagtctgcgacctgaggcttgtcgaccagcagccggaggcgcagtgcacacgagggggctggacttcgcctgtgatccttctaagcccttttgggtgctggtggtggttggtggagtcctggcttgctatagcttgctagtaacagtggcctttattattttctgggtgaggaaacggggcagaaagaaactcctgtatatattcaaacaaccatttatgagaccagtacaaactactcaagaggaagatggctgtagctgccgatttccagaagaagaagaaggaggatgtgaactggctagcctgagagtgaagttcagcaggagcgcagacgcccccgcgtaccagcagggccagaaccagctctataacgagctcaatctaggacgaagagaggagtacgatgttttggacaagagacgtggccgggaccctgagatggggggaaagccgcagagaaggaagaaccctcaggaaggcctgtacaatgaactgcagaaagataagatggcggaggcctacagtgagattgggatgaaaggcgagcgccggaggggcaaggggcacgatggcctttaccagggtctcagtacagccaccaaggacacctacgacgcccttcacatgcaggccctgccccctcgcgctagc

SEQ ID NO: 87 - protein, 25 aa, synthetic construct
  VARIANT 5: note = Q or V
  VARIANT 11: note = L or S
  VARIANT 14: note = A or P
QVQLXESGGGXVQXGGSLRLSCAAS

SEQ ID NO: 88 - protein, 14 aa, synthetic construct
  VARIANT 2: note = F, Y, or V
  VARIANT 9: note = E, C, or G
  VARIANT 10: note = R or L
  VARIANT 12: note = F, G, L, or W
  VARIANT 14: note = A, S, or T
WXRQAPGKXXEXVX

SEQ ID NO: 89 - protein, 37 aa, synthetic construct
  VARIANT 2: note = A, Q, T, or V
  VARIANT 3: note = D or E
  VARIANT 5: note = V or A
  VARIANT 10: note = T or A
  VARIANT 11: note = I or V
  VARIANT 13: note = R or Q
  VARIANT 15: note = N or K
  VARIANT 17: note = K or A
  VARIANT 20: note = V, L, or M
  VARIANT 25: note = N or D
  VARIANT 26: note = S or N
  VARIANT 28: note = K or R
  VARIANT 30: note = E or D
  VARIANT 33: note = A or G
  VARIANT 34: note = V, I, T, or M
YXXSXKGRFXXSXDXAXNTXYLQMXXLXPXDTXXYYC

SEQ ID NO: 90 - protein, 11 aa, synthetic construct
WGQGTQVTVSS

SEQ ID NO: 91 - protein, 8 aa, synthetic construct
DYKDDDDK

SEQ ID NO: 92 - protein, 10 aa, synthetic construct
  VARIANT 1..10: note = This sequence may encompass 5-10 residues
HHHHHHHHHH

SEQ ID NO: 93 - protein, 6 aa, synthetic construct
HHHHHH

SEQ ID NO: 94 - protein, 13 aa, synthetic construct
GAPVPYPDPLEPR

SEQ ID NO: 95 - protein, 621 aa, Homo sapiens [sequence omitted]

SEQ ID NO: 96 - DNA, 1866 bp, Homo sapiens
  source 1..1866: mol_type = genomic DNA
atggccttgccaacggctcgacccctgttggggtcctgtgggacccccgccctcggcagcctcctgttcctgctcttcagcctcggatgggtgcagccctcgaggaccctggctggagagacagggcaggctgcacccctggacggagtcctggccaacccacctaacatttccagcctctcccctcgccaactccttggcttcccgtgtgcggaggtgtccggcctgagcacggagcgtgtccgggagctggctgtggccttggcacagaagaatgtcaagctctcaacagagcagctgcgctgtctggctcaccggctctctgagccccccgaggacctggacgccctcccattggacctgctgctattcctcaacccagatgcgttctcggggccccaggcctgcacccgtttcttctcccgcatcacgaaggccaatgtggacctgctcccgaggggggctcccgagcgacagcggctgctgcctgcggctctggcctgctggggtgtgcgggggtctctgctgagcgaggctgatgtgcgggctctgggaggcctggcttgcgacctgcctgggcgctttgtggccgagtcggccgaagtgctgctaccccggctggtgagctgcccgggacccctggaccaggaccagcaggaggcagccagggcggctctgcagggcgggggacccccctacggccccccgtcgacatggtctgtctccacgatggacgctctgcggggcctgctgcccgtgctgggccagcccatcatccgcagcatcccgcagggcatcgtggccgcgtggcggcaacgctcctctcgggacccatcctggcggcagcctgaacggaccatcctccggccgcggttccggcgggaagtggagaagacagcctgtccttcaggcaagaaggcccgcgagatagacgagagcctcatcttctacaagaagtgggagctggaagcctgcgtggatgcggccctgctggccacccagatggaccgcgtgaacgccatccccttcacctacgagcagctggacgtcctaaagcataaactggatgagctctacccacaaggttaccccgagtctgtgatccagcacctgggctacctcttcctcaagatgagccctgaggacattcgcaagtggaatgtgacgtccctggagaccctgaaggctttgcttgaagtcaacaaagggcacgaaatgagtcctcaggtggccaccctgatcgaccgctttgtgaagggaaggggccagctagacaaagacaccctagacaccctgaccgccttctaccctgggtacctgtgctccctcagccccgaggagctgagctccgtgccccccagcagcatctgggcggtcaggccccaggacctggacacgtgtgacccaaggcagctggacgtcctctatcccaaggcccgccttgctttccagaacatgaacgggtccgaatacttcgtgaagatccagtccttcctgggtggggcccccacggaggatttgaaggcgctcagtcagcagaatgtgagcatggacttggccacgttcatgaagctgcggacggatgcggtgctgccgttgactgtggctgaggtgcagaaacttctgggaccccacgtggagggcctgaaggcggaggagcggcaccgcccggtgcgggactggatcctacggcagcggcaggacgacctggacacgctggggctggggctacagggcggcatccccaacggctacctggtcctagacctcagcgtgcaagaggccctctcggggacgccctgcctcctaggacctggacctgttctcaccgtcctggcactgctcctagcctccaccctggcctga

SEQ ID NO: 97 - protein, 8 aa, synthetic construct
GFTLDYFA

SEQ ID NO: 98 - protein, 8 aa, synthetic construct
GRNFSSYP

SEQ ID NO: 99 - protein, 8 aa, synthetic construct
ISSSGDST

SEQ ID NO: 100 - protein, 8 aa, synthetic construct
ISWSGGRT

SEQ ID NO: 101 - protein, 25 aa, synthetic construct
QVQLVESGGGLVQAGGSLRLSCVAS

SEQ ID NO: 102 - protein, 25 aa, synthetic construct
QVQLVESGGGLVQPGGSLRLSCAAS

SEQ ID NO: 103 - protein, 25 aa, synthetic construct
QLQLVESGGGLVQPGGSLRLSCAAS

SEQ ID NO: 104 - protein, 25 aa, synthetic construct
DVQLVESGGGLVQAGGSLRLSCAAS

SEQ ID NO: 105 - protein, 25 aa, synthetic construct
EVQLVESGGGSVQAGETLRLSCTAS

SEQ ID NO: 106 - protein, 25 aa, synthetic construct
QLQLVESGGGLVQPGGSLRLTCAAS

SEQ ID NO: 107 - protein, 25 aa, synthetic construct
QVQLVESGGGLVQAGGSLRLSCAAS

SEQ ID NO: 108 - protein, 17 aa, synthetic construct
MGWFRQSPGKEREFVAA

SEQ ID NO: 109 - protein, 17 aa, synthetic construct
VAWYRQAPGEQREPVAA

SEQ ID NO: 110 - protein, 17 aa, synthetic construct
IGWFRQAPGKEREGVSY

SEQ ID NO: 111 - protein, 17 aa, synthetic construct
MGYYRQISTKQRNLVAA

SEQ ID NO: 112 - protein, 17 aa, synthetic construct
MSWHRQAPGKDRELVSS

SEQ ID NO: 113 - protein, 17 aa, synthetic construct
IGWFRQAPGKEREGVSS

SEQ ID NO: 114 - protein, 17 aa, synthetic construct
MGWYRQAPGDECELVST

SEQ ID NO: 115 - protein, 17 aa, synthetic construct
MGWFRQAPGKEREFVAA

SEQ ID NO: 116 - protein, 38 aa, synthetic construct
YYADSVKGRFTISGDNAKNSVYLQMNSLKPEDTAVYIC

SEQ ID NO: 117 - protein, 38 aa, synthetic construct
IYADSVKGRFTISRDNAKNTVYLQMSSLKPEDTAVYYC

SEQ ID NO: 118 - protein, 38 aa, synthetic construct
NYADSVKGRFTISRDNAKNTVYLQMNSLKPEDTGVYSC

SEQ ID NO: 119 - protein, 38 aa, synthetic construct
YYADSVKGRFTISWDNANNTLFLQMNSLKSEDTAVYYC

SEQ ID NO: 120 - protein, 38 aa, synthetic construct
HYADSVRGRFTISKGNARNTLYLQMNSLKPEDTAVYFC

SEQ ID NO: 121 - protein, 38 aa, synthetic construct
NYADSVKGRFTVSRDNAKHTVYLQMNSLKPEDTAVYYC

SEQ ID NO: 122 - protein, 38 aa, synthetic construct
NYADSVKGRFTISQDNAKNTVYLQMTSLKPEDTAIYSC

SEQ ID NO: 123 - protein, 38 aa, synthetic construct
NYADSVKGRFTVSRDNAKQTVYLQMNSLKPEDTAVYYC

SEQ ID NO: 124 - protein, 38 aa, synthetic construct
NYADTVKGRFTISRDNAKNTVYLQMNSLKPEDTGVYSC

SEQ ID NO: 125 - protein, 38 aa, synthetic construct
FYAASVKGRFTISRDTAKNSVYLQMNSLKPEDTAVYIC

SEQ ID NO: 126 - protein, 38 aa, synthetic construct
IYADSVKGRFTISRDNAKNTVYLQMNSLKPEDTAVYYC

SEQ ID NO: 127 - protein, 11 aa, synthetic construct
WGQGTSVTVSS

SEQ ID NO: 128 - protein, 10 aa, synthetic construct
WGQGTSVTVS

SEQ ID NO: 129 - protein, 10 aa, synthetic construct
WGQGTLVTVS

SEQ ID NO: 130 - protein, 10 aa, synthetic construct
MGQGTSVTVS

SEQ ID NO: 131 - DNA, 8035 bp, synthetic construct
  source 1..8035: mol_type = other DNA
gacattgattattgactagttattaatagtaatcaattacggggtcattagttcatagcccatatatggagttccgcgttacataacttacggtaaatggcccgcctggctgaccgcccaacgacccccgcccattgacgtcaataatgacgtatgttcccatagtaacgccaatagggactttccattgacgtcaatgggtggagtatttacggtaaactgcccacttggcagtacatcaagtgtatcatatgccaagtacgccccctattgacgtcaatgacggtaaatggcccgcctggcattatgcccagtacatgaccttatgggactttcctacttggcagtacatctacgtattagtcatcgctattaccatggtgatgcggttttggcagtacatcaatgggcgtggatagcggtttgactcacggggatttccaagtctccaccccattgacgtcaatgggagtttgttttggcaccaaaatcaacgggactttccaaaatgtcgtaacaactccgccccattgacgcaaatgggcggtaggcgtgtacggtgggaggtctatataagcagcgcgttttgcctgtactgggtctctctggttagaccagatctgagcctgggagctctctggctaactagggaacccactgcttaagcctcaataaagcttgccttgagtgcttcaagtagtgtgtgcccgtctgttgtgtgactctggtaactagagatccctcagacccttttagtcagtgtggaaaatctctagcagtggcgcccgaacagggacttgaaagcgaaagggaaaccagaggagctctctcgacgcaggactcggcttgctgaagcgcgcacggcaagaggcgaggggcggcgactggtgagtacgccaaaaattttgactagcggaggctagaaggagagagatgggtgcgagagcgtcagtattaagcgggggagaattagatcgcgatgggaaaaaattcggttaaggccagggggaaagaaaaaatataaattaaaacatatagtatgggcaagcagggagctagaacgattcgcagttaatcctggcctgttagaaacatcagaaggctgtagacaaatactgggacagctacaaccatcccttcagacaggatcagaagaacttagatcattatataatacagtagcaaccctctattgtgtgcatcaaaggatagagataaaagacaccaaggaagctttagacaagatagaggaagagcaaaacaaaagtaagaccaccgcacagcaagcggccgctgatcttcagacctggaggaggagatatgagggacaattggagaagtgaattatataaatataaagtagtaaaaattgaaccattaggagtagcacccaccaaggcaaagagaagagtggtgcagagagaaaaaagagcagtgggaataggagctttgttccttgggttcttgggagcagcaggaagcactatgggcgcagcgtcaatgacgctgacggtacaggccagacaattattgtctggtatagtgcagcagcagaacaatttgctgagggctattgaggcgcaacagcatctgttgcaactcacagtctggggcatcaagcagctccaggcaagaatcctggctgtggaaagatacctaaaggatcaacagctcctggggatttggggttgctctggaaaactcatttgcaccactgctgtgccttggaatgctagttggagtaataaatctctggaacagatttggaatcacacgacctggatggagtgggacagagaaattaacaattacacaagcttaatacactccttaattgaagaatcgcaaaaccagcaagaaaagaatgaacaagaattattggaattagataaatgggcaagtttgtggaattggtttaacataacaaattggctgtggtatataaaattattcataatgatagtaggaggcttggtaggtttaagaatagtttttgctgtactttctatagtgaatagagttaggcagggatattcaccattatcgtttcagacccacctcccaaccccgaggggaccccgggtttattacagggacagcagagatccactttggcgccggctcgagttttaaaagaaaaggggggattggggggtacagtgcaggggaaagaatagtagacataatagcaacagacatacaaactaaagaattacaaaaacaaattacaaaaattcaaaatttttcgagtggctccggtgcccgtcagtgggcagagcgcacatcgcccacagtccccgagaagttggggggaggggtcggcaattgaaccggtgcctagagaaggtggcgcggggtaaactgggaaagtgatgtcgtgtactggctccgcctttttcccgagggtgggggagaaccgtatataagtgcagtagtcgccgtgaacgttctttttcgcaacgggtttgccgccagaacacaggtgtcgtgacgcgggatccgccaccatgctcaggctgctcttggctctcaacttattcccttcaattcaagtaacaggagggtcttccttttttgaagacccgacgccagcgccaactattgcgagtcagcctctcagtctgcgacctgaggcttgtcgaccagcagccggaggcgcagtgcacacgagggggctggacttcgcctgtgatccttctaagcccttttgggtgctggtggtggttggtggagtcctggcttgctatagcttgctagtaacagtggcctttattattttctgggtgaggaaacggggcagaaagaaactcctgtatatattcaaacaaccatttatgagaccagtacaaactactcaagaggaagatggctgtagctgccgatttccagaagaagaagaaggaggatgtgaactggctagcctgagagtgaagttcagcaggagcgcagacgcccccgcgtaccagcagggccagaaccagctctataacgagctcaatctaggacgaagagaggagtacgatgttttggacaagagacgtggccgggaccctgagatggggggaaagccgcagagaaggaagaaccctcaggaaggcctgtacaatgaactgcagaaagataagatggcggaggcctacagtgagattgggatgaaaggcgagcgccggaggggcaaggggcacgatggcctttaccagggtctcagtacagccaccaaggacacctacgacgcccttcacatgcaggccctgccccctcgcgctagcgccacgaacttctctctgttaaagcaagcaggcgacgtggaagaaaaccccggtcccgtgagcaagggcgaggagctgttcaccggggtggtgcccatcctggtcgagctggacggcgacgtaaacggccacaagttcagcgtgtccggcgagggcgagggcgatgccacctacggcaagctgaccctgaagttcatctgcaccaccggcaagctgcccgtgccctggcccaccctcgtgaccaccctgacctacggcgtgcagtgcttcagccgctaccccgaccacatgaagcagcacgacttcttcaagtccgccatgcccgaaggctacgtccaggagcgcaccatcttcttcaaggacgacggcaactacaagacccgcgccgaggtgaagttcgagggcgacaccctggtgaaccgcatcgagctgaagggcatcgacttcaaggaggacggcaacatcctggggcacaagctggagtacaactacaacagccacaacgtctatatcatggccgacaagcagaagaacggcatcaaggtgaacttcaagatccgccacaacatcgaggacggcagcgtgcagctcgccgaccactaccagcagaacacccccatcggcgacggccccgtgctgctgcccgacaaccactacctgagcacccagtccgccctgagcaaagaccccaacgagaagcgcgatcacatggtcctgctggagttcgtgaccgccgccgggatcactctcggcatggacgagctgtacaagtaacgcgttaagtcgacaatcaacctctggattacaaaatttgtgaaagattgactggtattcttaactatgttgctccttttacgctatgtggatacgctgctttaatgcctttgtatcatgctattgcttcccgtatggctttcattttctcctccttgtataaatcctggttgctgtctctttatgaggagttgtggcccgttgtcaggcaacgtggcgtggtgtgcactgtgtttgctgacgcaacccccactggttggggcattgccaccacctgtcagctcctttccgggactttcgctttccccctccctattgccacggcggaactcatcgccgcctgccttgcccgctgctggacaggggctcggctgttgggcactgacaattccgtggtgttgtcggggaaatcatcgtcctttccttggctgctcgcctgtgttgccacctggattctgcgcgggacgtccttctgctacgtcccttcggccctcaatccagcggaccttccttcccgcggcctgctgccggctctgcggcctcttccgcgtctttgccttcgccctcagacgagtcggatctccctttgggccgcctccccgcgtcgactttaagaccaatgacttacaaggcagctgtagatcttagccactttttaaaagaaaaggggggactggaagggctaattcactcccaacgaagataagatctgctttttgcttgtactgggtctctctggttagaccagatctgagcctgggagctctctggctaactagggaacccactgcttaagcctcaataaagcttgccttgagtgcttcaagtagtgtgtgcccgtctgttgtgtgactctggtaactagagatccctcagacccttttagtcagtgtggaaaatctctagcagtacgtatagtagttcatgtcatcttattattcagtatttataacttgcaaagaaatgaatatcagagagtgagaggaacttgtttattgcagcttataatggttacaaataaagcaatagcatcacaaatttcacaaataaagcatttttttcactgcattctagttgtggtttgtccaaactcatcaatgtatcttatcatgtctggctctagctatcccgcccctaactccgcccatcccgcccctaactccgcccagttccgcccattctccgccccatggctgactaattttttttatttatgcagaggccgaggccgcctcggcctctgagctattccagaagtagtgaggaggcttttttggaggcctagggacgtacccaattcgccctatagtgagtcgtattacgcgcgctcactggccgtcgttttacaacgtcgtgactgggaaaaccctggcgttacccaacttaatcgccttgcagcacatccccctttcgccagctggcgtaatagcgaagaggcccgcaccgatcgcccttcccaacagttgcgcagcctgaatggcgaatgggacgcgccctgtagcggcgcattaagcgcggcgggtgtggtggttacgcgcagcgtgaccgctacacttgccagcgccctagcgcccgctcctttcgctttcttcccttcctttctcgccacgttcgccggctttccccgtcaagctctaaatcgggggctccctttagggttccgatttagtgctttacggcacctcgaccccaaaaaacttgattagggtgatggttcacgtagtgggccatcgccctgatagacggtttttcgccctttgacgttggagtccacgttctttaatagtggactcttgttccaaactggaacaacactcaaccctatctcggtctattcttttgatttataagggattttgccgatttcggcctattggttaaaaaatgagctgatttaacaaaaatttaacgcgaattttaacaaaatattaacgcttacaatttaggtggcacttttcggggaaatgtgcgcggaacccctatttgtttatttttctaaatacattcaaatatgtatccgctcatgagacaataaccctgataaatgcttcaataatattgaaaaaggaagagtatgagtattcaacatttccgtgtcgcccttattcccttttttgcggcattttgccttcctgtttttgctcacccagaaacgctggtgaaagtaaaagatgctgaagatcagttgggtgcacgagtgggttacatcgaactggatctcaacagcggtaagatccttgagagttttcgccccgaagaacgttttccaatgatgagcacttttaaagttctgctatgtggcgcggtattatcccgtattgacgccgggcaagagcaactcggtcgccgcatacactattctcagaatgacttggttgagtactcaccagtcacagaaaagcatcttacggatggcatgacagtaagagaattatgcagtgctgccataaccatgagtgataacactgcggccaacttacttctgacaacgatcggaggaccgaaggagctaaccgcttttttgcacaacatgggggatcatgtaactcgccttgatcgttgggaaccggagctgaatgaagccataccaaacgacgagcgtgacaccacgatgcctgtagcaatggcaacaacgttgcgcaaactattaactggcgaactacttactctagcttcccggcaacaattaatagactggatggaggcggataaagttgcaggaccacttctgcgctcggcccttccggctggctggtttattgctgataaatctggagccggtgagcgtgggtctcgcggtatcattgcagcactggggccagatggtaagccctcccgtatcgtagttatctacacgacggggagtcaggcaactatggatgaacgaaatagacagatcgctgagataggtgcctcactgattaagcattggtaactgtcagaccaagtttactcatatatactttagattgatttaaaacttcatttttaatttaaaaggatctaggtgaagatcctttttgataatctcatgaccaaaatcccttaacgtgagttttcgttccactgagcgtcagaccccgtagaaaagatcaaaggatcttcttgagatcctttttttctgcgcgtaatctgctgcttgcaaacaaaaaaaccaccgctaccagcggtggtttgtttgccggatcaagagctaccaactctttttccgaaggtaactggcttcagcagagcgcagataccaaatactgttcttctagtgtagccgtagttaggccaccacttcaagaactctgtagcaccgcctacatacctcgctctgctaatcctgttaccagtggctgctgccagtggcgataagtcgtgtcttaccgggttggactcaagacgatagttaccggataaggcgcagcggtcgggctgaacggggggttcgtgcacacagcccagcttggagcgaacgacctacaccgaactgagatacctacagcgtgagctatgagaaagcgccacgcttcccgaagggagaaaggcggacaggtatccggtaagcggcagggtcggaacaggagagcgcacgagggagcttccagggggaaacgcctggtatctttatagtcctgtcgggtttcgccacctctgacttgagcgtcgatttttgtgatgctcgtcaggggggcggagcctatggaaaaacgccagcaacgcggcctttttacggttcctggccttttgctggccttttgctcacatgtgtcgacggatcgggagatctcccgatcccctatggtgcactctcagtacaatctgctctgatgccgcatagttaagccagtatctgctccctgcttgtgtgttggaggtcgctgagtagtgcgcgagcaaaatttaagctacaacaaggcaaggcttgaccgacaattgcatgaagaatctgcttagggttaggcgttttgcgctgcttcgcgatgtacgggccagatatacgcgtt

SEQ ID NO: 132 - protein, 511 aa, synthetic construct
MLRLLLALNLFPSIQVTGGSSFFEDPTPAPTIASQPLSLRPEACRPAAGGAVHTRGLDFACDPSKPFWVLVVVGGVLACYSLLVTVAFIIFWVRKRGRKKLLYIFKQPFMRPVQTTQEEDGCSCRFPEEEEGGCELASLRVKFSRSADAPAYQQGQNQLYNELNLGRREEYDVLDKRRGRDPEMGGKPQRRKNPQEGLYNELQKDKMAEAYSEIGMKGERRRGKGHDGLYQGLSTATKDTYDALHMQALPPRASATNFSLLKQAGDVEENPGPVSKGEELFTGVVPILVELDGDVNGHKFSVSGEGEGDATYGKLTLKFICTTGKLPVPWPTLVTTLTYGVQCFSRYPDHMKQHDFFKSAMPEGYVQERTIFFKDDGNYKTRAEVKFEGDTLVNRIELKGIDFKEDGNILGHKLEYNYNSHNVYIMADKQKNGIKVNFKIRHNIEDGSVQLADHYQQNTPIGDGPVLLPDNHYLSTQSALSKDPNEKRDHMVLLEFVTAAGITLGMDELYK

SEQ ID NO: 133 - DNA, 7521 bp, synthetic construct
  source 1..7521: mol_type = other DNA
ggccgccagcacagtggtcgatcgacgataaaataaaagattttatttagtctccagaaaaaggggggaatgaaagaccccacctgtaggtttggcaagctagcttaagtaacgccattttgcaaggcatggaaaaatacataactgagaatagaaaagttcagatcaaggtcaggaacagatggaacagggtcgcgtcccgcaataaaagagcccacaacccctcactcggggcgccagtcctccgattgactgagtcgcccgggtacccgtgtatccaataaaccctcttgcagttgcatccgacttgtggtctcgctgttccttgggagggtctcctctgagtgattgactacccgtcagcgggggtctttcacatgcagcatgtatcaaaattaatttggttttttttcttaagtatttacattaaatggccatagtagttcattatggacagcgcagaaagagctggggagaattgtgaaattgttatccgctcacaattccacacaacatacgagccggaagcataaagtgtaaagcctggggtgcctaatgagtgagctaactcacattaattgcgttgcgctcactgcccgctttccagtcgggaaacctgtcgtgccagctgcattaatgaatcggccaacgcgcggggagaggcggtttgcgtattgggcgctcttccgcttcctcgctcactgactcgctgcgctcggtcgttcggctgcggcgagcggtatcagctcactcaaaggcggtaatacggttatccacagaatcaggggataacgcaggaaagaacatgtgagcaaaaggccagcaaaaggccaggaaccgtaaaaaggccgcgttgctggcgtttttccataggctccgcccccctgacgagcatcacaaaaatcgacgctcaagtcagaggtggcgaaacccgacaggactataaagataccaggcgtttccccctggaagctccctcgtgcgctctcctgttccgaccctgccgcttaccggatacctgtccgcctttctcccttcgggaagcgtggcgctttctcatagctcacgctgtaggtatctcagttcggtgtaggtcgttcgctccaagctgggctgtgtgcacgaaccccccgttcagcccgaccgctgcgccttatccggtaactatcgtcttgagtccaacccggtaagacacgacttatcgccactggcagcagccactggtaacaggattagcagagcgaggtatgtaggcggtgctacagagttcttgaagtggtggcctaactacggctacactagaagaacagtatttggtatctgcgctctgctgaagccagttaccttcggaaaaagagttggtagctcttgatccggcaaacaaaccaccgctggtagcggtggtttttttgtttgcaagcagcagattacgcgcagaaaaaaaggatctcaagaagatcctttgatcttttctacggggtctgacgctcagtggaacgaaaactcacgttaagggattttggtcatgagattatcaaaaaggatcttcacctagatccttttgcggccggccgcaaatcaatctaaagtatatatgagtaaacttggtctgacagttaccaatgcttaatcagtgaggcacctatctcagcgatctgtctatttcgttcatccatagttgcctgactccccgtcgtgtagataactacgatacgggagggcttaccatctggccccagtgctgcaatgataccgcgagacccacgctcaccggctccagatttatcagcaataaaccagccagccggaagggccgagcgcagaagtggtcctgcaactttatccgcctccatccagtctattaattgttgccgggaagctagagtaagtagttcgccagttaatagtttgcgcaacgttgttgccattgctacaggcatcgtggtgtcacgctcgtcgtttggtatggcttcattcagctccggttcccaacgatcaaggcgagttacatgatcccccatgttgtgcaaaaaagcggttagctccttcggtcctccgatcgttgtcagaagtaagttggccgcagtgttatcactcatggttatggcagcactgcataattctcttactgtcatgccatccgtaagatgcttttctgtgactggtgagtactcaaccaagtcattctgagaatagtgtatgcggcgaccgagttgctcttgcccggcgtcaatacgggataataccgcgccacatagcagaactttaaaagtgctcatcattggaaaacgttcttcggggcgaaaactctcaaggatcttaccgctgttgagatccagttcgatgtaacccactcgtgcacccaactgatcttcagcatcttttactttcaccagcgtttctgggtgagcaaaaacaggaaggcaaaatgccgcaaaaaagggaataagggcgacacggaaatgttgaatactcatactcttcctttttcaatattattgaagcatttatcagggttattgtctcatgagcggatacatatttgaatgtatttagaaaaataaacaaataggggttccgcgcacatttccccgaaaagtgccaccagctttgctcttaggagtttcctaatacatcccaaactcaaatatataaagcatttgacttgttctatgccctagttattaatagtaatcaattacggggtcattagttcatagcccatatatggagttccgcgttacataacttacggtaaatggcccgcctggctgaccgcccaacgacccccgcccattgacgtcaataatgacgtatgttcccatagtaacgccaatagggactttccattgacgtcaatgggtggagtatttacggtaaactgcccacttggcagtacatcaagtgtatcatatgccaagtacgccccctattgacgtcaatgacggtaaatggcccgcctggcattatgcccagtacatgaccttatgggactttcctacttggcagtacatctacgtattagtcatcgctattaccatggtgatgcggttttggcagtacatcaatgggcgtggatagcggtttgactcacggggatttccaagtctccaccccattgacgtcaatgggagtttgttttggcaccaaaatcaacgggactttccaaaatgtcgtaacaactccgccccattgacgcaaatgggcggtaggcgtgtacggtgggaggtctatataagcagagctcaataaaagagcccacaacccctcactcggcgcgccagtcctccgattgactgagtcgcccgggtacccgtgtatccaataaaccctcttgcagttgcatccgacttgtggtctcgctgttccttgggagggtctcctctgagtgattgactacccgtcagcgggggtctttcatttgggggctcgtccgggatcgggagacccctgcccagggaccaccgacccaccaccgggaggtaagctggccagcaacttatctgtgtctgtccgattgtctagtgtctatgactgattttatgcgcctgcgtcggtactagttagctaactagctctgtatctggcggacccgtggtggaactgacgagttcggaacacccggccgcaaccctgggagacgtcccagggacttcgggggccgtttttgtggcccgacctgagtccaaaaatcccgatcgttttggactctttggtgcaccccccttagaggagggatatgtggttctggtaggagacgagaacctaaaacagttcccgcctccgtctgaatttttgctttcggtttgggaccgaagccgcgccgcgcgtcttgtctgctgcagcatcgttctgtgttgtctctgtctgactgtgtttctgtatttgtctgaaaatatgggcccgggccagactgttaccactcccttaagtttgaccttaggtcactggaaagatgtcgagcggatcgctcacaaccagtcggtagatgtcaagaagagacgttgggttaccttctgctctgcagaatggccaacctttaacgtcggatggccgcgagacggcacctttaaccgagacctcatcacccaggttaagatcaaggtcttttcacctggcccgcatggacacccagaccaggtcccctacatcgtgacctgggaagccttggcttttgacccccctccctgggtcaagccctttgtacaccctaagcctccgcctcctcttcctccatccgccccgtctctcccccttgaacctcctcgttcgaccccgcctcgatcctccctttatccagccctcactccttctctaggcgcccccatatggccatatgagatcttatatggggcacccccgccccttgtaaacttccctgaccctgacatgacaagagttactaacagcccctctctccaagctcacttacaggctctctacttagtccagcacgaagtctggagacctctggcggcagcctaccaagaacaactggaccgaccggtggtacctcacccttaccgagtcggcgacacagtgtgggtccgccgacaccagactaagaacctagaacctcgctggaaaggaccttacacagtcctgctgaccacccccaccgccctcaaagtagacggcatcgcagcttggatacacgccgcccacgtgaaggctgccgaccccgggggtggaccatcctctagactgccggatccaagctggaggaaaaactgtttcatacagaaggcgtggaggaaaaactgtttcatacagaaggcgtggaggaaaaactgtttcatacagaaggcgtggaggaaaaactgtttcatacagaaggcgtcgcgaattcgcggagactctagagggtatataatggaagctcgatttccagcttggcattccggtactgttggtaaacaccaagctatgaccgagtacaagcccacggtgcgcctcgccacccgcgacgacgtccccagggccgtacgcaccctcgccgccgcgttcgccgactaccccgccacgcgccacaccgtcgatccggaccgccacatcgagcgggtcaccgagctgcaagaactcttcctcacgcgcgtcgggctcgacatcggcaaggtgtgggtcgcggacgacggcgccgccgtggcggtctggaccacgccggagagcgtcgaagcgggggcggtgttcgccgagatcggcccgcgcatggccgagttgagcggttcccggctggccgcgcagcaacagatggaaggcctcctggcgccgcaccggcccaaggagcccgcgtggttcctggccaccgtcggcgtttcgcccgaccaccagggcaagggtctgggcagcgccgtcgtgctccccggagtggaggcggccgagcgcgccggggtgcccgccttcctggagacctccgcgccccgcaacctccccttctacgagcggctcggcttcaccgtcaccgccgacgtcgaggtgcccgaaggaccgcgcacctggtgcatgacccgcaagcccggtgccgctagccgggccaagcggtccggatccggacagtgcaccaactatgcgctgctgaaactggcgggcgatgtggaaagcaacccgggcccgatggcttcgtacccctgccatcaacacgcgtctgcgttcgaccaggctgcgcgttctcgcggccatagcaaccgacgtacggcgttgcgccctcgccggcagcaagaagccacggaagtccgcctggagcagaaaatgcccacgctactgcgggtttatatagacggtcctcacgggatggggaaaaccaccaccacgcaactgctggtggccctgggttcgcgcgacgatatcgtctacgtacccgagccgatgacttactggcaggtgctgggggcttccgagacaatcgcgaacatctacaccacacaacaccgcctcgaccagggtgagatatcggccggggacgcggcggtggtaatgacaagcgcccagataacaatgggcatgccttatgccgtgaccgacgccgttctggctcctcatatcgggggggaggctgggagctcacatgccccgcccccggccctcaccctcatcttcgaccgccatcccatcgccgccctcctgtgctacccggccgcgcgataccttatgggcagcatgaccccccaggccgtgctggcgttcgtggccctcatcccgccgaccttgcccggcacaaacatcgtgttgggggcccttccggaggacagacacatcgaccgcctggccaaacgccagcgccccggcgagcggcttgacctggctatgctggccgcgattcgccgcgtttacgggctgcttgccaatacggtgcggtatctgcagggcggcgggtcgtggcgggaggattggggacagctttcggggacggccgtgccgccccagggtgccgagccccagagcaacgcgggcccacgaccccatatcggggacacgttatttaccctgtttcgggcccccgagttgctggcccccaacggcgacctgtacaacgtgtttgcctgggccttggacgtcttggccaaacgcctccgtcccatgcacgtctttatcctggattacgaccaatcgcccgccggctgccgggacgccctgctgcaacttacctccgggatggtccagacccacgtcaccacccccggctccataccgacgatctgcgacctggcgcgcacgtttgcccgggagatgggggaggctaaccgcgccaagcgctcgggttcgggtgccaccaacttcagcctgctgaagcaggccggcgacgtggaggagaaccccggccccatggtgagcgagctgattaaggagaacatgcacatgaagctgtacatggagggcaccgtgaacaaccaccacttcaagtgcacatccgagggcgaaggcaagccctacgagggcacccagaccatgagaatcaaggcggtcgagggcggccctctccccttcgccttcgacatcctggctaccagcttcatgtacggcagcaaaaccttcatcaaccacacccagggcatccccgacttctttaagcagtccttccccgagggcttcacatgggagagagtcaccacatacgaagacgggggcgtgctgaccgctacccaggacaccagcctccaggacggctgcctcatctacaacgtcaagatcagaggggtgaacttcccatccaacggccctgtgatgcagaagaaaacactcggctgggaggcctccaccgagaccctgtaccccgctgacggcggcctggaaggcagagccgacatggccctgaagctcgtgggcgggggccacctgatctgcaacttgaagaccacatacagatccaagaaacccgctaagaacctcaagatgcccggcgtctactatgtggacagaagactggaaagaatcaaggaggccgacaaagagacctacgtcgagcagcacgaggtggctgtggccagatactgcgacctccctagcaaactggggcacagataa

SEQ ID NO: 134 - DNA, 380 bp, synthetic construct
  source 1..380: mol_type = other DNA
gacattgattattgactagttattaatagtaatcaattacggggtcattagttcatagcccatatatggagttccgcgttacataacttacggtaaatggcccgcctggctgaccgcccaacgacccccgcccattgacgtcaataatgacgtatgttcccatagtaacgccaatagggactttccattgacgtcaatgggtggagtatttacggtaaactgcccacttggcagtacatcaagtgtatcatatgccaagtacgccccctattgacgtcaatgacggtaaatggcccgcctggcattatgcccagtacatgaccttatgggactttcctacttggcagtacatctacgtattagtcatcgctattaccatg

SEQ ID NO: 135 - DNA, 304 bp, synthetic construct
  source 1..304: mol_type = other DNA
cgttacataacttacggtaaatggcccgcctggctgaccgcccaacgacccccgcccattgacgtcaataatgacgtatgttcccatagtaacgccaatagggactttccattgacgtcaatgggtggagtatttacggtaaactgcccacttggcagtacatcaagtgtatcatatgccaagtacgccccctattgacgtcaatgacggtaaatggcccgcctggcattatgcccagtacatgaccttatgggactttcctacttggcagtacatctacgtattagtcatcgctattaccatg

SEQ ID NO: 136 - DNA, 199 bp, synthetic construct
  source 1..199: mol_type = other DNA
tgatgcggttttggcagtacatcaatgggcgtggatagcggtttgactcacggggatttccaagtctccaccccattgacgtcaatgggagtttgttttggcaccaaaatcaacgggactttccaaaatgtcgtaacaactccgccccattgacgcaaatgggcggtaggcgtgtacggtgggaggtctatataagcag

SEQ ID NO: 137 - DNA, 21 bp, synthetic construct
  source 1..21: mol_type = other DNA
cgcaaatgggcggtaggcgtg

SEQ ID NO: 138 - DNA, 181 bp, synthetic construct
  source 1..181: mol_type = other DNA
gggtctctctggttagaccagatctgagcctgggagctctctggctaactagggaacccactgcttaagcctcaataaagcttgccttgagtgcttcaagtagtgtgtgcccgtctgttgtgtgactctggtaactagagatccctcagacccttttagtcagtgtggaaaatctctagca

SEQ ID NO: 139 - DNA, 126 bp, synthetic construct
  source 1..126: mol_type = other DNA
ctctctcgacgcaggactcggcttgctgaagcgcgcacggcaagaggcgaggggcggcgactggtgagtacgccaaaaattttgactagcggaggctagaaggagagagatgggtgcgagagcgtc

SEQ ID NO: 140 - DNA, 234 bp, synthetic construct
  source 1..234: mol_type = other DNA
aggagctttgttccttgggttcttgggagcagcaggaagcactatgggcgcagcgtcaatgacgctgacggtacaggccagacaattattgtctggtatagtgcagcagcagaacaatttgctgagggctattgaggcgcaacagcatctgttgcaactcacagtctggggcatcaagcagctccaggcaagaatcctggctgtggaaagatacctaaaggatcaacagctcct

SEQ ID NO: 141 - DNA, 118 bp, synthetic construct
  source 1..118: mol_type = other DNA
ttttaaaagaaaaggggggattggggggtacagtgcaggggaaagaatagtagacataatagcaacagacatacaaactaaagaattacaaaaacaaattacaaaaattcaaaatttt

SEQ ID NO: 142 - DNA, 212 bp, synthetic construct
  source 1..212: mol_type = other DNA
gggcagagcgcacatcgcccacagtccccgagaagttggggggaggggtcggcaattgaaccggtgcctagagaaggtggcgcggggtaaactgggaaagtgatgtcgtgtactggctccgcctttttcccgagggtgggggagaaccgtatataagtgcagtagtcgccgtgaacgttctttttcgcaacgggtttgccgccagaacacag

SEQ ID NO: 143 - DNA, 762 bp, synthetic construct
  source 1..762: mol_type = other DNA
atgctcaggctgctcttggctctcaacttattcccttcaattcaagtaacaggagggtcttccttttttgaagacccgacgccagcgccaactattgcgagtcagcctctcagtctgcgacctgaggcttgtcgaccagcagccggaggcgcagtgcacacgagggggctggacttcgcctgtgatccttctaagcccttttgggtgctggtggtggttggtggagtcctggcttgctatagcttgctagtaacagtggcctttattattttctgggtgaggaaacggggcagaaagaaactcctgtatatattcaaacaaccatttatgagaccagtacaaactactcaagaggaagatggctgtagctgccgatttccagaagaagaagaaggaggatgtgaactggctagcctgagagtgaagttcagcaggagcgcagacgcccccgcgtaccagcagggccagaaccagctctataacgagctcaatctaggacgaagagaggagtacgatgttttggacaagagacgtggccgggaccctgagatggggggaaagccgcagagaaggaagaaccctcaggaaggcctgtacaatgaactgcagaaagataagatggcggaggcctacagtgagattgggatgaaaggcgagcgccggaggggcaaggggcacgatggcctttaccagggtctcagtacagccaccaaggacacctacgacgcccttcacatgcaggccctgccccctcgcgctagc

SEQ ID NO: 144 - DNA, 51 bp, synthetic construct
  source 1..51: mol_type = other DNA
atgctcaggctgctcttggctctcaacttattcccttcaattcaagtaaca

SEQ ID NO: 145 - DNA, 111 bp, synthetic construct
  source 1..111: mol_type = other DNA
ccgacgccagcgccaactattgcgagtcagcctctcagtctgcgacctgaggcttgtcgaccagcagccggaggcgcagtgcacacgagggggctggacttcgcctgtgat

SEQ ID NO: 146 - DNA, 87 bp, synthetic construct
  source 1..87: mol_type = other DNA
tctaagcccttttgggtgctggtggtggttggtggagtcctggcttgctatagcttgctagtaacagtggcctttattattttctgg

SEQ ID NO: 147 - DNA, 132 bp, synthetic construct
  source 1..132: mol_type = other DNA
gtgaggaaacggggcagaaagaaactcctgtatatattcaaacaaccatttatgagaccagtacaaactactcaagaggaagatggctgtagctgccgatttccagaagaagaagaaggaggatgtgaactg

SEQ ID NO: 148 - DNA, 342 bp, synthetic construct
  source 1..342: mol_type = other DNA
ctgagagtgaagttcagcaggagcgcagacgcccccgcgtaccagcagggccagaaccagctctataacgagctcaatctaggacgaagagaggagtacgatgttttggacaagagacgtggccgggaccctgagatggggggaaagccgcagagaaggaagaaccctcaggaaggcctgtacaatgaactgcagaaagataagatggcggaggcctacagtgagattgggatgaaaggcgagcgccggaggggcaaggggcacgatggcctttaccagggtctcagtacagccaccaaggacacctacgacgcccttcacatgcaggccctgccccctcgc

SEQ ID NO: 149 - DNA, 57 bp, synthetic construct
  source 1..57: mol_type = other DNA
gccacgaacttctctctgttaaagcaagcaggcgacgtggaagaaaaccccggtccc

SEQ ID NO: 150 - DNA, 717 bp, synthetic construct
  source 1..717: mol_type = other DNA
gtgagcaagggcgaggagctgttcaccggggtggtgcccatcctggtcgagctggacggcgacgtaaacggccacaagttcagcgtgtccggcgagggcgagggcgatgccacctacggcaagctgaccctgaagttcatctgcaccaccggcaagctgcccgtgccctggcccaccctcgtgaccaccctgacctacggcgtgcagtgcttcagccgctaccccgaccacatgaagcagcacgacttcttcaagtccgccatgcccgaaggctacgtccaggagcgcaccatcttcttcaaggacgacggcaactacaagacccgcgccgaggtgaagttcgagggcgacaccctggtgaaccgcatcgagctgaagggcatcgacttcaaggaggacggcaacatcctggggcacaagctggagtacaactacaacagccacaacgtctatatcatggccgacaagcagaagaacggcatcaaggtgaacttcaagatccgccacaacatcgaggacggcagcgtgcagctcgccgaccactaccagcagaacacccccatcggcgacggccccgtgctgctgcccgacaaccactacctgagcacccagtccgccctgagcaaagaccccaacgagaagcgcgatcacatggtcctgctggagttcgtgaccgccgccgggatcactctcggcatggacgagctgtacaagtaa

SEQ ID NO: 151 - DNA, 589 bp, synthetic construct
  source 1..589: mol_type = other DNA
aatcaacctctggattacaaaatttgtgaaagattgactggtattcttaactatgttgctccttttacgctatgtggatacgctgctttaatgcctttgtatcatgctattgcttcccgtatggctttcattttctcctccttgtataaatcctggttgctgtctctttatgaggagttgtggcccgttgtcaggcaacgtggcgtggtgtgcactgtgtttgctgacgcaacccccactggttggggcattgccaccacctgtcagctcctttccgggactttcgctttccccctccctattgccacggcggaactcatcgccgcctgccttgcccgctgctggacaggggctcggctgttgggcactgacaattccgtggtgttgtcggggaaatcatcgtcctttccttggctgctcgcctgtgttgccacctggattctgcgcgggacgtccttctgctacgtcccttcggccctcaatccagcggaccttccttcccgcggcctgctgccggctctgcggcctcttccgcgtctttgccttcgccctcagacgagtcggatctccctttgggccgcctccccgc

SEQ ID NO: 152 - DNA, 12 bp, synthetic construct
  source 1..12: mol_type = other DNA
tcggccctcaat

SEQ ID NO: 153 - DNA, 234 bp, synthetic construct
  source 1..234: mol_type = other DNA
tggaagggctaattcactcccaacgaagataagatctgctttttgcttgtactgggtctctctggttagaccagatctgagcctgggagctctctggctaactagggaacccactgcttaagcctcaataaagcttgccttgagtgcttcaagtagtgtgtgcccgtctgttgtgtgactctggtaactagagatccctcagacccttttagtcagtgtggaaaatctctagca

SEQ ID NO: 154 - DNA, 122 bp, synthetic construct
  source 1..122: mol_type = other DNA
aacttgtttattgcagcttataatggttacaaataaagcaatagcatcacaaatttcacaaataaagcatttttttcactgcattctagttgtggtttgtccaaactcatcaatgtatctta

SEQ ID NO: 155 - DNA, 358 bp, synthetic construct
  source 1..358: mol_type = other DNA
aagctggccagcaacttatctgtgtctgtccgattgtctagtgtctatgactgattttatgcgcctgcgtcggtactagttagctaactagctctgtatctggcggacccgtggtggaactgacgagttcggaacacccggccgcaaccctgggagacgtcccagggacttcgggggccgtttttgtggcccgacctgagtccaaaaatcccgatcgttttggactctttggtgcaccccccttagaggagggatatgtggttctggtaggagacgagaacctaaaacagttcccgcctccgtctgaatttttgctttcggtttgggaccgaagccgcgccgcgcgtcttgtctgctg

SEQ ID NO: 156 - DNA, 417 bp, synthetic construct
  source 1..417: mol_type = other DNA
ggccagactgttaccactcccttaagtttgaccttaggtcactggaaagatgtcgagcggatcgctcacaaccagtcggtagatgtcaagaagagacgttgggttaccttctgctctgcagaatggccaacctttaacgtcggatggccgcgagacggcacctttaaccgagacctcatcacccaggttaagatcaaggtcttttcacctggcccgcatggacacccagaccaggtcccctacatcgtgacctgggaagccttggcttttgacccccctccctgggtcaagccctttgtacaccctaagcctccgcctcctcttcctccatccgccccgtctctcccccttgaacctcctcgttcgaccccgcctcgatcctccctttatccagccctcactccttctctaggcgcc

SEQ ID NO: 157 - DNA, 375 bp, synthetic construct
  source 1..375: mol_type = other DNA
ccatatgagatcttatatggggcacccccgccccttgtaaacttccctgaccctgacatgacaagagttactaacagcccctctctccaagctcacttacaggctctctacttagtccagcacgaagtctggagacctctggcggcagcctaccaagaacaactggaccgaccggtggtacctcacccttaccgagtcggcgacacagtgtgggtccgccgacaccagactaagaacctagaacctcgctggaaaggaccttacacagtcctgctgaccacccccaccgccctcaaagtagacggcatcgcagcttggatacacgccgcccacgtgaaggctgccgaccccgggggtggaccatcctctagactg

SEQ ID NO: 158 - DNA, 603 bp, synthetic construct
  source 1..603: mol_type = other DNA
atgaccgagtacaagcccacggtgcgcctcgccacccgcgacgacgtccccagggccgtacgcaccctcgccgccgcgttcgccgactaccccgccacgcgccacaccgtcgatccggaccgccacatcgagcgggtcaccgagctgcaagaactcttcctcacgcgcgtcgggctcgacatcggcaaggtgtgggtcgcggacgacggcgccgccgtggcggtctggaccacgccggagagcgtcgaagcgggggcggtgttcgccgagatcggcccgcgcatggccgagttgagcggttcccggctggccgcgcagcaacagatggaaggcctcctggcgccgcaccggcccaaggagcccgcgtggttcctggccaccgtcggcgtttcgcccgaccaccagggcaagggtctgggcagcgccgtcgtgctccccggagtggaggcggccgagcgcgccggggtgcccgccttcctggagacctccgcgccccgcaacctccccttctacgagcggctcggcttcaccgtcaccgccgacgtcgaggtgcccgaaggaccgcgcacctggtgcatgacccgcaagcccggtgccgctagc

SEQ ID NO: 159 - DNA, 12 bp, synthetic construct
  source 1..12: mol_type = other DNA
cgggccaagcgg

SEQ ID NO: 160 - DNA, 12 bp, synthetic construct
  source 1..12: mol_type = other DNA
tccggatccgga

SEQ ID NO: 161 - DNA, 12 bp, synthetic construct
  source 1..12: mol_type = other DNA
tcgggttcgggt

SEQ ID NO: 162 - DNA, 60 bp, synthetic construct
  source 1..60: mol_type = other DNA
cagtgcaccaactatgcgctgctgaaactggcgggcgatgtggaaagcaacccgggcccg

SEQ ID NO: 163 - DNA, 1128 bp, synthetic construct
  source 1..1128: mol_type = other DNA
atggcttcgtacccctgccatcaacacgcgtctgcgttcgaccaggctgcgcgttctcgcggccatagcaaccgacgtacggcgttgcgccctcgccggcagcaagaagccacggaagtccgcctggagcagaaaatgcccacgctactgcgggtttatatagacggtcctcacgggatggggaaaaccaccaccacgcaactgctggtggccctgggttcgcgcgacgatatcgtctacgtacccgagccgatgacttactggcaggtgctgggggcttccgagacaatcgcgaacatctacaccacacaacaccgcctcgaccagggtgagatatcggccggggacgcggcggtggtaatgacaagcgcccagataacaatgggcatgccttatgccgtgaccgacgccgttctggctcctcatatcgggggggaggctgggagctcacatgccccgcccccggccctcaccctcatcttcgaccgccatcccatcgccgccctcctgtgctacccggccgcgcgataccttatgggcagcatgaccccccaggccgtgctggcgttcgtggccctcatcccgccgaccttgcccggcacaaacatcgtgttgggggcccttccggaggacagacacatcgaccgcctggccaaacgccagcgccccggcgagcggcttgacctggctatgctggccgcgattcgccgcgtttacgggctgcttgccaatacggtgcggtatctgcagggcggcgggtcgtggcgggaggattggggacagctttcggggacggccgtgccgccccagggtgccgagccccagagcaacgcgggcccacgaccccatatcggggacacgttatttaccctgtttcgggcccccgagttgctggcccccaacggcgacctgtacaacgtgtttgcctgggccttggacgtcttggccaaacgcctccgtcccatgcacgtctttatcctggattacgaccaatcgcccgccggctgccgggacgccctgctgcaacttacctccgggatggtccagacccacgtcaccacccccggctccataccgacgatctgcgacctggcgcgcacgtttgcccgggagatgggggaggctaac

SEQ ID NO: 164 - DNA, 699 bp, synthetic construct
  source 1..699: mol_type = other DNA
atggtgagcgagctgattaaggagaacatgcacatgaagctgtacatggagggcaccgtgaacaaccaccacttcaagtgcacatccgagggcgaaggcaagccctacgagggcacccagaccatgagaatcaaggcggtcgagggcggccctctccccttcgccttcgacatcctggctaccagcttcatgtacggcagcaaaaccttcatcaaccacacccagggcatccccgacttctttaagcagtccttccccgagggcttcacatgggagagagtcaccacatacgaagacgggggcgtgctgaccgctacccaggacaccagcctccaggacggctgcctcatctacaacgtcaagatcagaggggtgaacttcccatccaacggccctgtgatgcagaagaaaacactcggctgggaggcctccaccgagaccctgtaccccgctgacggcggcctggaaggcagagccgacatggccctgaagctcgtgggcgggggccacctgatctgcaacttgaagaccacatacagatccaagaaacccgctaagaacctcaagatgcccggcgtctactatgtggacagaagactggaaagaatcaaggaggccgacaaagagacctacgtcgagcagcacgaggtggctgtggccagatactgcgacctccctagcaaactggggcacagataa

SEQ ID NO: 165 - DNA, 32 bp, synthetic construct
  source 1..32: mol_type = other DNA
tagagggtatataatggaagctcgatttccag

SEQ ID NO: 166 - protein, 254 aa, synthetic construct
MLRLLLALNLFPSIQVTGGSSFFEDPTPAPTIASQPLSLRPEACRPAAGGAVHTRGLDFACDPSKPFWVLVVVGGVLACYSLLVTVAFIIFWVRKRGRKKLLYIFKQPFMRPVQTTQEEDGCSCRFPEEEEGGCELASLRVKFSRSADAPAYQQGQNQLYNELNLGRREEYDVLDKRRGRDPEMGGKPQRRKNPQEGLYNELQKDKMAEAYSEIGMKGERRRGKGHDGLYQGLSTATKDTYDALHMQALPPRAS

SEQ ID NO: 167 - protein, 17 aa, synthetic construct
MLRLLLALNLFPSIQVT

SEQ ID NO: 168 - protein, 37 aa, synthetic construct
PTPAPTIASQPLSLRPEACRPAAGGAVHTRGLDFACD

SEQ ID NO: 169 - protein, 29 aa, synthetic construct
SKPFWVLVVVGGVLACYSLLVTVAFIIFW

SEQ ID NO: 170 - protein, 44 aa, synthetic construct
VRKRGRKKLLYIFKQPFMRPVQTTQEEDGCSCRFPEEEEGGCEL

SEQ ID NO: 171 - protein, 114 aa, synthetic construct
LRVKFSRSADAPAYQQGQNQLYNELNLGRREEYDVLDKRRGRDPEMGGKPQRRKNPQEGLYNELQKDKMAEAYSEIGMKGERRRGKGHDGLYQGLSTATKDTYDALHMQALPPR

SEQ ID NO: 172 - protein, 19 aa, synthetic construct
ATNFSLLKQAGDVEENPGP

SEQ ID NO: 173 - protein, 238 aa, synthetic construct
VSKGEELFTGVVPILVELDGDVNGHKFSVSGEGEGDATYGKLTLKFICTTGKLPVPWPTLVTTLTYGVQCFSRYPDHMKQHDFFKSAMPEGYVQERTIFFKDDGNYKTRAEVKFEGDTLVNRIELKGIDFKEDGNILGHKLEYNYNSHNVYIMADKQKNGIKVNFKIRHNIEDGSVQLADHYQQNTPIGDGPVLLPDNHYLSTQSALSKDPNEKRDHMVLLEFVTAAGITLGMDELYK

SEQ ID NO: 174 - protein, 201 aa, synthetic construct
MTEYKPTVRLATRDDVPRAVRTLAAAFADYPATRHTVDPDRHIERVTELQELFLTRVGLDIGKVWVADDGAAVAVWTTPESVEAGAVFAEIGPRMAELSGSRLAAQQQMEGLLAPHRPKEPAWFLATVGVSPDHQGKGLGSAVVLPGVEAAERAGVPAFLETSAPRNLPFYERLGFTVTADVEVPEGPRTWCMTRKPGAAS

SEQ ID NO: 175 - protein, 4 aa, synthetic construct
RAKR

SEQ ID NO: 176 - protein, 4 aa, synthetic construct
SGSG

SEQ ID NO: 177 - protein, 20 aa, synthetic construct
QCTNYALLKLAGDVESNPGP

SEQ ID NO: 178 - protein, 376 aa, synthetic construct
MASYPCHQHASAFDQAARSRGHSNRRTALRPRRQQEATEVRLEQKMPTLLRVYIDGPHGMGKTTTTQLLVALGSRDDIVYVPEPMTYWQVLGASETIANIYTTQHRLDQGEISAGDAAVVMTSAQITMGMPYAVTDAVLAPHIGGEAGSSHAPPPALTLIFDRHPIAALLCYPAARYLMGSMTPQAVLAFVALIPPTLPGTNIVLGALPEDRHIDRLAKRQRPGERLDLAMLAAIRRVYGLLANTVRYLQGGGSWREDWGQLSGTAVPPQGAEPQSNAGPRPHIGDTLFTLFRAPELLAPNGDLYNVFAWALDVLAKRLRPMHVFILDYDQSPAGCRDALLQLTSGMVQTHVTTPGSIPTICDLARTFAREMGEAN

SEQ ID NO: 179 - protein, 232 aa, synthetic construct
MVSELIKENMHMKLYMEGTVNNHHFKCTSEGEGKPYEGTQTMRIKAVEGGPLPFAFDILATSFMYGSKTFINHTQGIPDFFKQSFPEGFTWERVTTYEDGGVLTATQDTSLQDGCLIYNVKIRGVNFPSNGPVMQKKTLGWEASTETLYPADGGLEGRADMALKLVGGGHLICNLKTTYRSKKPAKNLKMPGVYYVDRRLERIKEADKETYVEQHEVAVARYCDLPSKLGHR

SEQ ID NO: 180 - DNA, 357 bp, synthetic construct
  source 1..357: mol_type = other DNA
caagtaaaacttgaagaatcaggtggtggaagcgttcaagctggtggatctctcagacttagttgtaccgcacccggccttagaagtaatagctgtggcatggactggtacagacaagcaccaggcaaggaacgcgagttcgtttcatcaataagtgcagatggaaccacttcatacgcagattccgtcaagggacggtttaccattagtaaggataaagccaaggacacattctacctccaaatgaacaatttgaagccagaagacactgctatgtattcatgcaaggcgtatggttacgacgagaattactatgctatggactattggggtcaaggaacctcagtcaccgtctcc

SEQ ID NO: 181 - DNA, 333 bp, synthetic construct
  source 1..333: mol_type = other DNA
gaggtccaactcgtcgaatctggggggggcagcgtacaagccggagggtcactcaggttgtcttgcacagcatctggatttacattcgatgattctgacatgggttggtaccgacaagcccctggaaatgaacgcgaactcgtatccaccattagtagtgatggtagcgcctactacgccgactcagtgaaaggacgctttactatctcacaggacaacgccaagaacacagtctatcttcaaatgaactccctcaaaccagaagatactgctgtgtactattgcgctgcagattggccccctgggggccaagggactctggtcactgtctct

SEQ ID NO: 182 - DNA, 375 bp, synthetic construct
  source 1..375: mol_type = other DNA
caagttcagcttgtagagtcaggcggtggactcgttcaagccggaggctcactgcggttgtcttgtgccgcatctggtcgaaacttctcaagttatcctatggggtggttccggcaggctccaggtaaagagcgggaatttgtcgcagcaattagttggtctggtggtcgtactttttatgctgcttcagtaaaaggtcgattcactatatcacgggatactgcaaaaaatactgtctatctccaaatgaactctctgaagcctgaagatactgctgtgtattactgtgccgcagaaggagatgattacattatggtaacgacgaccggctatgttatggactactggggtcaaggaacctcagtcaccgtctcc

SEQ ID NO: 183 - DNA, 333 bp, synthetic construct
  source 1..333: mol_type = other DNA
gaggtccaactcgtcgaatctggggggggcagcgtacaagccggagggtcactcaggttgtctcgcacagcatctggatttacattcgatgattctgacatgggttggtatcgacaagcccctggaaatgaatgcgaactcgtatccaccgtcagtagtgatggtagcgcctactacgccgactcagtgaaaggacgctttactatctcacaggacaacgccaagaacacagtctatcttcaaatgaactccctcaaaccagaagatactgctgtgtactattgcgctgcagattggccccctgggggccaagggactctggtcaccgtctcc

SEQ ID NO: 184 - DNA, 348 bp, synthetic construct
  source 1..348: mol_type = other DNA
caagtaaaacttgaagaatcaggtggtggaagcgttcaagctggtgaatctctcagacttagttgtaccgcacccggctttacaagtaatagctgtggcatggactggtacagacaagcaccaggcaaggaacgcgagttcgttgcatcaataaatacagatggaaccacttcatacgcagattccgtcaagggacggtttaccgttagtaaggacaaagccaaggacacagtctacctccaaatgaacagtttgaagccagaagacactgctatgtattcatgcatctactgtaggtacgacggggagtttgcttactggggccaagggactctggtcactgtctct

SEQ ID NO: 185 - DNA, 390 bp, synthetic construct
  source 1..390: mol_type = other DNA
aattttggtcgtcgggtacgcaatcgccgccagttaaatagcttgcaaaatacgtggccttatggttacagtatgcccatcgcagttcgctacacgcaggacgctttttcacgttctggttggttgtggcctgttgatgctaaaggtgagccgcttaaagctaccagttatatggctgttggtttctatgtggctaaatacgttaacaaaaagtcagatatggaccttgctgctaaaggtctaggagctaaagaatggaacaactcactaaaaaccaagctgtcgctacttcccaagaagctgttcagaatcagaatgagccgcaacttcgggatgaaaatgctcacaatgacaaagctgtccacggagtgcttaatccaacttaccaag

SEQ ID NO: 186 - DNA, 324 bp, synthetic construct
  source 1..324: mol_type = other DNA
acaaagaaacgcggcacagaatgtttataggtctgttgaacacgaccagaaaactggcctaacgacgtttggtcagttccatcaacatcatagccagatgcccagagattagagcgcatgacaagtaaaggacggttgtcagcgtcataagaggttttacctccaaatgaagaaataacatcatggtaacgctgcatgaagtaatcacgttcttggtcagtatgcaaattagcataagcagcttgcagacccataatgtcaatagatgtggtagaagtcgtcatttggcgagaaagctcagtctcaggaggaagcggagcagtc

SEQ ID NO: 187 - protein, 119 aa, synthetic construct
QVKLEESGGGSVQAGGSLRLSCTAPGLRSNSCGMDWYRQAPGKEREFVSSISADGTTSYADSVKGRFTISKDKAKDTFYLQMNNLKPEDTAMYSCKAYGYDENYYAMDYWGQGTSVTVS

SEQ ID NO: 188 - protein, 111 aa, synthetic construct
EVQLVESGGGSVQAGGSLRLSCTASGFTFDDSDMGWYRQAPGNERELVSTISSDGSAYYADSVKGRFTISQDNAKNTVYLQMNSLKPEDTAVYYCAADWPPGGQGTLVTVS

SEQ ID NO: 189 - protein, 125 aa, synthetic construct
QVQLVESGGGLVQAGGSLRLSCAASGRNFSSYPMGWFRQAPGKEREFVAAISWSGGRTFYAASVKGRFTISRDTAKNTVYLQMNSLKPEDTAVYYCAAEGDDYIMVTTTGYVMDYWGQGTSVTVS

SEQ ID NO: 190 - protein, 111 aa, synthetic construct
EVQLVESGGGSVQAGGSLRLSRTASGFTFDDSDMGWYRQAPGNECELVSTVSSDGSAYYADSVKGRFTISQDNAKNTVYLQMNSLKPEDTAVYYCAADWPPGGQGTLVTVS

SEQ ID NO: 191 - protein, 116 aa, synthetic construct
QVKLEESGGGSVQAGESLRLSCTAPGFTSNSCGMDWYRQAPGKEREFVASINTDGTTSYADSVKGRFTVSKDKAKDTVYLQMNSLKPEDTAMYSCIYCRYDGEFAYWGQGTLVTVS

SEQ ID NO: 192 - protein, 130 aa, synthetic construct
NFGRRVRNRRQLNSLQNTWPYGYSMPIAVRYTQDAFSRSGWLWPVDAKGEPLKATSYMAVGFYVAKYVNKKSDMDLAAKGLGAKEWNNSLKTKLSLLPKKLFRIRMSRNFGMKMLTMTKLSTECLIQLTK

SEQ ID NO: 193 - protein, 110 aa, synthetic construct
ESGGGLVQPGGSLRLSCAASGSMFSINAVAWYRQAPGEQREPVAAMTSGGSTIYADSVKGRFTISRDNAKNTVYLQMNSLKPEDTAVYYCNGGWSLAMDYWGQGTSVTVS

SEQ ID NO: 194 - protein, 116 aa, synthetic construct
EVQLVESGGGLVQPGGSLRLSCAASGSMFSINAVAWYRQAPGEQREPVAAMTSGGSTIYADSVKGRFTISRDNAKNTVYLQMNSLKPEDTAMYSCIYCRYDGEFAYWGQGTLVTVS

SEQ ID NO: 195 - protein, 115 aa, synthetic construct
EVQLVESGGGLVQPGGSLRLSCAASGSMFSINAVAWYRQAPGEQREPVAAMTSGGSTIYADSVKGRFTISRDNAKNTVYLQMNSLKPEDTAVYYCNGGWSLAMDYWGQGTSVTVS

SEQ ID NO: 196 - protein, 115 aa, synthetic construct
EVQLVESGGGLVQPGGSLRLSCAASGSMFSINAVAWYRQAPGEQREPVAAMTSGGSTIYADSVKGRFTISRDNAKNTVYLQMNSLKPEDTAVYYCNGGWSLAMDYWGQGTTVTVS

SEQ ID NO: 197 - protein, 115 aa, synthetic construct
EVQLVESGGGLVQPGGSLRLSCAASGSMFSINAVAWYRQAPGKQREPVAAMTSGGSTIYADSVKGRFTISRDNAKNTVYLQMNSLKPEDTAVYYCNGGWSLAMDYWGQGTSVTVS

SEQ ID NO: 198 - protein, 115 aa, synthetic construct
EVQLVESGGGLVQPGGSLRLSCAASGSMFSINAVGWYRQAPGEQREPVAAMTSGGSTIYADSVKGRFTISRDNAKNTVYLQMNSLKPEDTAVYYCNGGWSLAMDYWGQGTSVTVS

SEQ ID NO: 199 - protein, 115 aa, synthetic construct
EVQLVESGGGLVQPGGSLRLSCAASGSMFSINAVGWYRQAPGKQREPVAAMTSGGSTIYADSVKGRFTISRDNAKNTVYLQMNSLKPEDTAVYYCNGGWSLAMDYWGQGTSVTVS

SEQ ID NO: 200 - protein, 115 aa, synthetic construct
EVQLVESGGGLVQPGGSLRLSCAASGSMVSINAVAWYRQAPGEQREPVAAMTSGGSTIYADSVKGRFTISRDNAKNTVYLQMNSLKPEDTAVYYCNGGWSLAMDYWGQGTSVTVS

SEQ ID NO: 201 - protein, 120 aa, synthetic construct
EVQLVESGGGSVQAGETLRLSCTASGFTFDDSDMGWHRQAPGKERELVAVISSGGSTYYADSVKGRFTISRDYSKNTLYLQMNSLKPEETAVYYCYAQGYDYDEGYGMDYWGQGTSVTVS

SEQ ID NO: 202 - protein, 115 aa, synthetic construct
EVQLVESGGGSVQAGETLRLSCTASGFTFDDSDMGWYRQAPGEQREPVAAMTSGGSTIYADSVKGRFTISRDNAKNTVYLQMNSLKPEDTAVYYCNGGWSLAMDYWGQGTSVTVS

SEQ ID NO: 203 - protein, 115 aa, synthetic construct
EVQLVESGGGSVQAGETLRLSCTASGFTFDDSDMGWYRQAPGKQREPVAAMTSGGSTIYADSVKGRFTISRDNAKNTVYLQMNSLKPEDTAVYYCNGGWSLAMDYWGQGTSVTVS

SEQ ID NO: 204 - protein, 101 aa, synthetic construct
GGSLRLSCAASGSMFSINAVAWYRQAPGEQREPVAAMTSGGSTIYADSVKGRFTISRDNAKNTVYLQMNSLKPEDTAVYYCNGGWSLAMDYWGQGTSVTVS

SEQ ID NO: 205 - protein, 114 aa, synthetic construct
LQLVESGGGLVQPGGSLRLSCAASGSMFSINAVAWYRQAPGEQREPVAAMTSGGSTIYADSVKGRFTISRDNAKNTVYLQMNSLKPEDTAVYYCNGGWSLAMDYWGQGASVTVS

SEQ ID NO: 206 - protein, 114 aa, synthetic construct
LQLVESGGGLVQPGGSLRLSCAASGSMFSINAVAWYRQAPGEQREPVAAMTSGGSTIYADSVKGRFTISRDNAKNTVYLQMNSLKPEDTAVYYCNGGWSLAMDYWGQGTSVTVS

SEQ ID NO: 207 - protein, 114 aa, synthetic construct
LQLVESGGGLVQPGGSLRLSCAASGSMFSINAVAWYRQAPGEQREPVAAMTSGGSTIYADSVKGRFTISRDNAKNTVYLQMNSLKPEDTAVYYCNGGWSLAMDYWGQGTTVTVS

SEQ ID NO: 208 - protein, 114 aa, synthetic construct
LQLVESGGGLVQPGGSLRLSCAASGSMFSINAVAWYRQAPGKQREPVAAMTSGGSTIYADSVKGRFTISRDNAKNTVYLQMNSLKPEDTAVYYCNGGWSLAMDYWGQGTSVTVS

SEQ ID NO: 209 - protein, 114 aa, synthetic construct
LQLVESGGGLVQPGGSLRLSCAASGSMFSINAVGWYRQAPGEQREPVAAMTSGGSTIYADSVKGRFTISRDNAKNTVYLQMNSLKPEDTAVYYCNGGWSLAMDYWGQGTSVTVS

SEQ ID NO: 210 - protein, 114 aa, synthetic construct
LQLVESGGGLVQPGGSLRLSCAASGSMFSINAVGWYRQAPGKQREPVAAMTSGGSTIYADSVKGRFTISRDNAKNTVYLQMNSLKPEDTAVYYCNGGWSLAMDYWGQGTSVTVS

SEQ ID NO: 211 - protein, 114 aa, synthetic construct
LQLVESGGGLVQPGGSLRLTCAASGSMFSINAVAWYRQAPGEQREPVAAMTSGGSTIYADSVKGRFTISRDNAKNTVYLQMNSLKPEDTAVYYCNGGWSLAMDYWGQGTSVTVS

SEQ ID NO: 212 - protein, 112 aa, synthetic construct
LVESGGGLVQAGGSLRLSCAASGRTFSSYNMGWHRQAPGKERELVAVISSGGSTYYADSVKGRFTISRDYSKNTLYLQMNSLKPEETAVYYCNGGWSLAMDYWGQGTSVTVS

SEQ ID NO: 213 - protein, 112 aa, synthetic construct
LVESGGGLVQPGGSLRLSCAASGSMFSINAVAWYRQAPGEQREPVAAMTSGGSTIYADSVKGRFTISRDNAKNTVYLQMNSLKPEDTAVYYCNGGWSLAMDYWGQGTSVTVS

SEQ ID NO: 214 - protein, 112 aa, synthetic construct
LVESGGGLVQPGGSLRLSCAASGSMFSINAVGWYRQAPGKQREPVAAMTSGGSTIYADSVKGRFTISRDNAKNTVYLQMNSLKPEDTAVYYCNGGWSLAMDYWGQGTSVTVS

SEQ ID NO: 215 - protein, 113 aa, synthetic construct
QLVESGGGLVQPGGSLRLSCAASGSMFSINAVAWYRQAPGEQREPVAAMTSGGSTIYADSVKGRFTISRDNAKNTVYLQMNSLKPEDTAVYYCNGGWSLAMDYWGQGTSVTVS

SEQ ID NO: 216 - protein, 113 aa, synthetic construct
QLVESGGGLVQPGGSLRLSCAASGSMFSINAVGWYRQAPGEQREPVAAMTSGGSTIYADSVKGRFTISRDNAKNTVYLQMNSLKPEDTAVYYCNGGWSLAMDYWGQGTSVTVS

SEQ ID NO: 217 - protein, 113 aa, synthetic construct
QLVESGGGLVQPGGSLRLSCAASGSMFSINAVGWYRQAPGKQREPVAAMTSGGSTIYADSVKGRFTISRDNAKNTVYLQMNSLKPEDTAVYYCNGGWSLAMDYWGQGTSVTVS

SEQ ID NO: 218 - protein, 102 aa, synthetic construct
SGGSLRLSCAASGSMFSINAVAWYRQAPGEQREPVAAMTSGGSTIYADSVKGRFTISRDNAKNTVYLQMNSLKPEDTAVYYCNGGWSLAMDYWGQGTSVTVS

SEQ ID NO: 219 - protein, 102 aa, synthetic construct
SGGSLRLSCAASGSMFSINAVAWYRQAPGKQREPVAAMTSGGSTIYADSVKGRFTISRDNAKNTVYLQMNSLKPEDTAVYYCNGGWSLAMDYWGQGTSVTVS

SEQ ID NO: 220 - protein, 102 aa, synthetic construct
SGGSLRLSCAASGSMFSINAVGWYRQAPGEQREPVAAMTSGGSTIYADSVKGRFTISRDNAKNTVYLQMNSLKPEDTAVYYCNGGWSLAMDYWGQGTSVTVS

SEQ ID NO: 221 - protein, 102 aa, synthetic construct
SGGSLRLSCAASGSMFSINAVGWYRQAPGKQREPVAAMTSGGSTIYADSVKGRFTISRDNAKNTVYLQMNSLKPEDTAVYYCNGGWSLAMDYWGQGTSVTVS

SEQ ID NO: 222 - protein, 111 aa, synthetic construct
VESGGGLVQPGGSLRLSCAASGSMFSINAVAWYRQAPGEQREPVAAMTSGGSTIYADSVKGRFTISRDNAKNTVYLQMNSLKPEDTAVYYCNGGWSLAMDYWGQGTSVTVS

SEQ ID NO: 223 - protein, 104 aa, synthetic construct
VESGGSLRLSCAASGSMFSINAVAWYRQAPGEQREPVAAMTSGGSTIYADSVKGRFTISRDNAKNTVYLQMNSLKPEDTAVYYCNGGWSLAMDYWGQGTSVTVS

SEQ ID NO: 224 - protein, 114 aa, synthetic construct
VHLVESGGGLVQPGGSLRLSCAASGSMFSINAVAWYRQAPGEQREPVAAMTSGGSTIYADSVKGRFTISRDNAKNTVYLQMNSLKPEDTAVYYCNGGWSLAMDYWGQGTSVTVS

SEQ ID NO: 225 - protein, 114 aa, synthetic construct
VKLEESGGGSVQAGESLRLSCAASGSMFSINAVAWYRQAPGEQREPVAAMTSGGSTIYADSVKGRFTISRDNAKNTVYLQMNSLKPEDTAVYYCNGGWSLAMDYWGQGTSVTVS

SEQ ID NO: 226 - protein, 114 aa, synthetic construct
VKLEESGGGSVQAGESLRLSCTAPGFTSNSCGMAWYRQAPGEQREPVAAMTSGGSTIYADSVKGRFTISRDNAKNTVYLQMNSLKPEDTAVYYCNGGWSLAMDYWGQGTSVTVS

SEQ ID NO: 227 - protein, 114 aa, synthetic construct
VKLEESGGGSVQAGESLRLSCTAPGFTSNSCGMDWYRQAPGEQREPVAAMTSGGSTIYADSVKGRFTISRDNAKNTVYLQMNSLKPEDTAVYYCNGGWSLAMDYWGQGTSVTVS

SEQ ID NO: 228 - protein, 114 aa, synthetic construct
VKLEESGGGSVQAGESLRLSCTAPGFTSNSCGMDWYRQAPGKQREPVAAMTSGGSTIYADSVKGRFTISRDNAKNTVYLQMNSLKPEDTAVYYCNGGWSLAMDYWGQGTSVTVS

SEQ ID NO: 229 - protein, 114 aa, synthetic construct
VKLVESGGGLVQPGGSLRLSCAASGSMFSINAVAWYRQAPGEQREPVAAMTSGGSTIYADSVKGRFTISRDNAKNTVYLQMNSLKPEDTAVYYCNGGWSLAMDYWGQGTSVTVS

SEQ ID NO: 230 - protein, 114 aa, synthetic construct
VQFVESGGGLVQPGGSLRLSCAASGSMFSINAVAWYRQAPGEQREPVAAMTSGGSTIYADSVKGRFTISRDNAKNTVYLQMNSLKPEDTAVYYCNGGWSLAMDYWGQGTSVTVS

SEQ ID NO: 231 - protein, 114 aa, synthetic construct
VQIVESGGGLVQPGGSLRLSCAASGSMFSINAVAWYRQAPGEQREPVAAMTSGGSTIYADSVKGRFTISRDNAKNTVYLQMNSLKPEDTAVYYCNGGWSLAMDYWGQGTSVTVS

SEQ ID NO: 232 - protein, 114 aa, synthetic construct
VQLDESGGGLVQPGGSLRLSCAASGSMFSINAVAWYRQAPGEQREPVAAMTSGGSTIYADSVKGRFTISRDNAKNTVYLQMNSLKPEDTAVYYCNGGWSLAMDYWGQGTSVTVS

SEQ ID NO: 233 - protein, 114 aa, synthetic construct
VQLIESGGGLVQPGGSLRLSCAASGSMFSINAVAWYRQAPGEQREPVAAMTSGGSTIYADSVKGRFTISRDNAKNTVYLQMNSLKPEDTAVYYCNGGWSLAMDYWGQGTSVTVS

SEQ ID NO: 234 - protein, 114 aa, synthetic construct
VQLVECGGGLVQPGGSLRLSCAASGSMFSINAVAWYRQAPGEQREPVAAMTSGGSTIYADSVKGRFTISRDNAKNTVYLQMNSLKPEDTAVYYCNGGWSLAMDYWGQGTSVTVS

SEQ ID NO: 235 - protein, 114 aa, synthetic construct
VQLVEGGGGLVQPGGSLRLSCAASGSMFSINAVAWYRQAPGEQREPVAAMTSGGSTIYADSVKGRFTISRDNAKNTVYLQMNSLKPEDTAVYYCNGGWSLAMDYWGQGTSVTVS

SEQ ID NO: 236 - protein, 114 aa, synthetic construct
VQLVEIGGGLVQPGGSLRLSCAASGSMFSINAVAWYRQAPGEQREPVAAMTSGGSTIYADSVKGRFTISRDNAKNTVYLQMNSLKPEDTAVYYCNGGWSLAMDYWGQGTSVTVS

SEQ ID NO: 237 - protein, 114 aa, synthetic construct
VQLVENGGGLVQPGGSLRLSCAASGSMFSINAVAWYRQAPGEQREPVAAMTSGGSTIYADSVKGRFTISRDNAKNTVYLQMNSLKPEDTAVYYCNGGWSLAMDYWGQGTSVTVS

SEQ ID NO: 238 - protein, 114 aa, synthetic construct
VQLVERGGGLVQPGGSLRLSCAASGSMFSINAVAWYRQAPGEQREPVAAMTSGGSTIYADSVKGRFTISRDNAKNTVYLQMNSLKPEDTAVYYCNGGWSLAMDYWGQGTSVTVS

SEQ ID NO: 239 - protein, 114 aa, synthetic construct
VQLVESCGGLVQPGGSLRLSCAASGSMFSINAVAWYRQAPGEQREPVAAMTSGGSTIYADSVKGRFTISRDNAKNTVYLQMNSLKPEDTAVYYCNGGWSLAMDYWGQGTSVTVS

SEQ ID NO: 240 - protein, 114 aa, synthetic construct
VQLVESGEGLVQPGGSLRLSCAASGSMFSINAVAWYRQAPGEQREPVAAMTSGGSTIYADSVKGRFTISRDNAKNTVYLQMNSLKPEDTAVYYCNGGWSLAMDYWGQGTSVTVS

SEQ ID NO: 241 - protein, 114 aa, synthetic construct
VQLVESGGELVQPGGSLRLSCAASGSMFSINAVAWYRQAPGEQREPVAAMTSGGSTIYADSVKGRFTISRDNAKNTVYLQMNSLKPEDTAVYYCNGGWSLAMDYWGQGTSVTVS

SEQ ID NO: 242 - protein, 114 aa, synthetic construct
VQLVESGGGLAQPGGSLRLSCAASGSMFSINAVAWYRQAPGEQREPVAAMTSGGSTIYADSVKGRFTISRDNAKNTVYLQMNSLKPEDTAVYYCNGGWSLAMDYWGQGTSVTVS

SEQ ID NO: 243 - protein, 114 aa, synthetic construct
VQLVESGGGLLQPGGSLRLSCAASGSMFSINAVAWYRQAPGEQREPVAAMTSGGSTIYADSVKGRFTISRDNAKNTVYLQMNSLKPEDTAVYYCNGGWSLAMDYWGQGTSVTVS

SEQ ID NO: 244 - protein, 114 aa, synthetic construct
VQLVESGGGLVKPGGSLRLSCAASGSMFSINAVAWYRQAPGEQREPVAAMTSGGSTIYADSVKGRFTISRDNAKNTVYLQMNSLKPEDTAVYYCNGGWSLAMDYWGQGTSVTVS

SEQ ID NO: 245 - protein, 114 aa, synthetic construct
VQLVESGGGLVQAGGSLRLSCAASGRTFSSYNMGWHRQAPGKERELVAVISSGGSTYYADSVKGRFTISRDNAKNTVYLQMNSLKPEDTAVYYCNGGWSLAMDYWGQGTSVTVS

SEQ ID NO: 246 - protein, 119 aa, synthetic construct
VQLVESGGGLVQAGGSLRLSCAASGRTFSSYNMGWHRQAPGKERELVAVISSGGSTYYADSVKGRFTISRDYSKNTLYLQMNSLKPEETAVYYCYAQGYDYDEGYGMDYWGQGTSVTVS

SEQ ID NO: 247 - protein, 114 aa, synthetic construct
VQLVESGGGLVQAGGSLRLSCAASGRTFSSYNMGWHRQAPGKQREPVAAMTSGGSTIYADSVKGRFTISRDNAKNTVYLQMNSLKPEDTAVYYCNGGWSLAMDYWGQGTSVTVS

SEQ ID NO: 248 - protein, 114 aa, synthetic construct
VQLVESGGGLVQLGGSLRLSCAASGSMFSINAVAWYRQAPGEQREPVAAMTSGGSTIYADSVKGRFTISRDNAKNTVYLQMNSLKPEDTAVYYCNGGWSLAMDYWGQGTSVTVS

SEQ ID NO: 249 - protein, 114 aa, synthetic construct
VQLVESGGGLVQPCGSLRLSCAASGSMFSINAVAWYRQAPGEQREPVAAMTSGGSTIYADSVKGRFTISRDNAKNTVYLQMNSLKPEDTAVYYCNGGWSLAMDYWGQGTSVTVS

SEQ ID NO: 250 - protein, 114 aa, synthetic construct
VQLVESGGGLVQPDGSLRLSCAASGSMFSINAVAWYRQAPGEQREPVAAMTSGGSTIYADSVKGRFTISRDNAKNTVYLQMNSLKPEDTAVYYCNGGWSLAMDYWGQGTSVTVS

SEQ ID NO: 251 - protein, 114 aa, synthetic construct
VQLVESGGGLVQPGESLRLSCAASGSMFSINAVAWYRQAPGEQREPVAAMTSGGSTIYADSVKGRFTISRDNAKNTVYLQMNSLKPEDTAVYYCNGGWSLAMDYWGQGTSVTVS

SEQ ID NO: 252 - protein, 114 aa, synthetic construct
VQLVESGGGLVQPGGFLRLSCAASGSMFSINAVAWYRQAPGEQREPVAAMTSGGSTIYADSVKGRFTISRDNAKNTVYLQMNSLKPEDTAVYYCNGGWSLAMDYWGQGTSVTVS

SEQ ID NO: 253 - protein, 114 aa, synthetic construct
VQLVESGGGLVQPGGSLGLSCAASGSMFSINAVAWYRQAPGEQREPVAAMTSGGSTIYADSVKGRFTISRDNAKNTVYLQMNSLKPEDTAVYYCNGGWSLAMDYWGQGTSVTVS

SEQ ID NO: 254 - protein, 114 aa, synthetic construct
VQLVESGGGLVQPGGSLKLSCAASGSMFSINAVAWYRQAPGEQREPVAAMTSGGSTIYADSVKGRFTISRDNAKNTVYLQMNSLKPEDTAVYYCNGGWSLAMDYWGQGTSVTVS

SEQ ID NO: 255 - protein, 114 aa, synthetic construct
VQLVESGGGLVQPGGSLRLPCAASGSMFSINAVAWYRQAPGEQREPVAAMTSGGSTIYADSVKGRFTISRDNAKNTVYLQMNSLKPEDTAVYYCNGGWSLAMDYWGQGTSVTVS

SEQ ID NO: 256 - protein, 114 aa, synthetic construct
VQLVESGGGLVQPGGSLRLSCAAGGSMFSINAVAWYRQAPGEQREPVAAMTSGGSTIYADSVKGRFTISRDNAKNTVYLQMNSLKPEDTAVYYCNGGWSLAMDYWGQGTSVTVS

SEQ ID NO: 257 - protein, 114 aa, synthetic construct
VQLVESGGGLVQPGGSLRLSCAARGSMFSINAVAWYRQAPGEQREPVAAMTSGGSTIYADSVKGRFTISRDNAKNTVYLQMNSLKPEDTAVYYCNGGWSLAMDYWGQGTSVTVS

SEQ ID NO: 258 - protein, 114 aa, synthetic construct
VQLVESGGGLVQPGGSLRLSCAASCSMFSINAVAWYRQAPGEQREPVAAMTSGGSTIYADSVKGRFTISRDNAKNTVYLQMNSLKPEDTAVYYCNGGWSLAMDYWGQGTSVTVS

SEQ ID NO: 259 - protein, 114 aa, synthetic construct
VQLVESGGGLVQPGGSLRLSCAASGAMFSINAVAWYRQAPGEQREPVAAMTSGGSTIYADSVKGRFTISRDNAKNTVYLQMNSLKPEDTAVYYCNGGWSLAMDYWGQGTSVTVS

SEQ ID NO: 260 - protein, 114 aa, synthetic construct
VQLVESGGGLVQPGGSLRLSCAASGFMFSINAVAWYRQAPGEQREPVAAMTSGGSTIYADSVKGRFTISRDNAKNTVYLQMNSLKPEDTAVYYCNGGWSLAMDYWGQGTSVTVS

SEQ ID NO: 261 - protein, 114 aa, synthetic construct
VQLVESGGGLVQPGGSLRLSCAASGSIFSINAVAWYRQAPGEQREPVAAMTSGGSTIYADSVKGRFTISRDNAKNTVYLQMNSLKPEDTAVYYCNGGWSLAMDYWGQGTSVTVS

SEQ ID NO: 262 - protein, 114 aa, synthetic construct
VQLVESGGGLVQPGGSLRLSCAASGSLFSINAVAWYRQAPGEQREPVAAMTSGGSTIYADSVKGRFTISRDNAKNTVYLQMNSLKPEDTAVYYCNGGWSLAMDYWGQGTSVTVS

SEQ ID NO: 263 - protein, 114 aa, synthetic construct
VQLVESGGGLVQPGGSLRLSCAASGSMCSINAVAWYRQAPGEQREPVAAMTSGGSTIYADSVKGRFTISRDNAKNTVYLQMNSLKPEDTAVYYCNGGWSLAMDYWGQGTSVTVS

SEQ ID NO: 264 - protein, 114 aa, synthetic construct
VQLVESGGGLVQPGGSLRLSCAASGSMFFINAVAWYRQAPGEQREPVAAMTSGGSTIYADSVKGRFTISRDNAKNTVYLQMNSLKPEDTAVYYCNGGWSLAMDYWGQGTSVTVS

SEQ ID NO: 265 - protein, 114 aa, synthetic construct
VQLVESGGGLVQPGGSLRLSCAASGSMFPINAVAWYRQAPGEQREPVAAMTSGGSTIYADSVKGRFTISRDNAKNTVYLQMNSLKPEDTAVYYCNGGWSLAMDYWGQGTSVTVS

SEQ ID NO: 266 - protein, 114 aa, synthetic construct
VQLVESGGGLVQPGGSLRLSCAASGSMFSIDAVAWYRQAPGEQREPVAAMTSGGSTIYADSVKGRFTISRDNAKNTVYLQMNSLKPEDTAVYYCNGGWSLAMDYWGQGTSVTVS

SEQ ID NO: 267 - protein, 114 aa, synthetic construct
VQLVESGGGLVQPGGSLRLSCAASGSMFSINAAAWYRQAPGEQREPVAAMTSGGSTIYADSVKGRFTISRDNAKNTVYLQMNSLKPEDTAVYYCNGGWSLAMDYWGQGTSVTVS

SEQ ID NO: 268 - protein, 114 aa, synthetic construct
VQLVESGGGLVQPGGSLRLSCAASGSMFSINAEAWYRQAPGEQREPVAAMTSGGSTIYADSVKGRFTISRDNAKNTVYLQMNSLKPEDTAVYYCNGGWSLAMDYWGQGTSVTVS

SEQ ID NO: 269 - protein, 114 aa, synthetic construct
VQLVESGGGLVQPGGSLRLSCAASGSMFSINAGAWYRQAPGEQREPVAAMTSGGSTIYADSVKGRFTISRDNAKNTVYLQMNSLKPEDTAVYYCNGGWSLAMDYWGQGTSVTVS

SEQ ID NO: 270 - protein, 114 aa, synthetic construct
VQLVESGGGLVQPGGSLRLSCAASGSMFSINALAWYRQAPGEQREPVAAMTSGGSTIYADSVKGRFTISRDNAKNTVYLQMNSLKPEDTAVYYCNGGWSLAMDYWGQGTSVTVS

SEQ ID NO: 271 - protein, 114 aa, synthetic construct
VQLVESGGGLVQPGGSLRLSCAASGSMFSINAMAWYRQAPGEQREPVAAMTSGGSTIYADSVKGRFTISRDNAKNTVYLQMNSLKPEDTAVYYCNGGWSLAMDYWGQGTSVTVS

SEQ ID NO: 272 - protein, 114 aa, synthetic construct
VQLVESGGGLVQPGGSLRLSCAASGSMFSINAVACYRQAPGEQREPVAAMTSGGSTIYADSVKGRFTISRDNAKNTVYLQMNSLKPEDTAVYYCNGGWSLAMDYWGQGTSVTVS

SEQ ID NO: 273 - protein, 114 aa, synthetic construct
VQLVESGGGLVQPGGSLRLSCAASGSMFSINAVALYRQAPGEQREPVAAMTSGGSTIYADSVKGRFTISRDNAKNTVYLQMNSLKPEDTAVYYCNGGWSLAMDYWGQGTSVTVS

SEQ ID NO: 274 - protein, 114 aa, synthetic construct
VQLVESGGGLVQPGGSLRLSCAASGSMFSINAVARYRQAPGEQREPVAAMTSGGSTIYADSVKGRFTISRDNAKNTVYLQMNSLKPEDTAVYYCNGGWSLAMDYWGQGTSVTVS

SEQ ID NO: 275 - protein, 114 aa, synthetic construct
VQLVESGGGLVQPGGSLRLSCAASGSMFSINAVAWCRQAPGEQREPVAAMTSGGSTIYADSVKGRFTISRDNAKNTVYLQMNSLKPEDTAVYYCNGGWSLAMDYWGQGTSVTVS

SEQ ID NO: 276 - protein, 114 aa, synthetic construct
VQLVESGGGLVQPGGSLRLSCAASGSMFSINAVAWDRQAPGEQREPVAAMTSGGSTIYADSVKGRFTISRDNAKNTVYLQMNSLKPEDTAVYYCNGGWSLAMDYWGQGTSVTVS

SEQ ID NO: 277 - protein, 114 aa, synthetic construct
VQLVESGGGLVQPGGSLRLSCAASGSMFSINAVAWFRQAPGEQREPVAAMTSGGSTIYADSVKGRFTISRDNAKNTVYLQMNSLKPEDTAVYYCNGGWSLAMDYWGQGTSVTVS

SEQ ID NO: 278 - protein, 114 aa, synthetic construct
VQLVESGGGLVQPGGSLRLSCAASGSMFSINAVAWHRQAPGEQREPVAAMTSGGSTIYADSVKGRFTISRDNAKNTVYLQMNSLKPEDTAVYYCNGGWSLAMDYWGQGTSVTVS

SEQ ID NO: 279 - protein, 114 aa, synthetic construct
VQLVESGGGLVQPGGSLRLSCAASGSMFSINAVAWNRQAPGEQREPVAAMTSGGSTIYADSVKGRFTISRDNAKNTVYLQMNSLKPEDTAVYYCNGGWSLAMDYWGQGTSVTVS

SEQ ID NO: 280 - protein, 114 aa, synthetic construct
VQLVESGGGLVQPGGSLRLSCAASGSMFSINAVAWYGQAPGEQREPVAAMTSGGSTIYADSVKGRFTISRDNAKNTVYLQMNSLKPEDTAVYYCNGGWSLAMDYWGQGTSVTVS

SEQ ID NO: 281 - protein, 114 aa, synthetic construct
VQLVESGGGLVQPGGSLRLSCAASGSMFSINAVAWYKQAPGEQREPVAAMTSGGSTIYADSVKGRFTISRDNAKNTVYLQMNSLKPEDTAVYYCNGGWSLAMDYWGQGTSVTVS

SEQ ID NO: 282 - protein, 114 aa, synthetic construct
VQLVESGGGLVQPGGSLRLSCAASGSMFSINAVAWYMQAPGEQREPVAAMTSGGSTIYADSVKGRFTISRDNAKNTVYLQMNSLKPEDTAVYYCNGGWSLAMDYWGQGTSVTVS

SEQ ID NO: 283 - protein, 114 aa, synthetic construct
VQLVESGGGLVQPGGSLRLSCAASGSMFSINAVAWYRKAPGEQREPVAAMTSGGSTIYADSVKGRFTISRDNAKNTVYLQMNSLKPEDTAVYYCNGGWSLAMDYWGQGTSVTVS

SEQ ID NO: 284 - protein, 114 aa, synthetic construct
VQLVESGGGLVQPGGSLRLSCAASGSMFSINAVAWYRQALGEQREPVAAMTSGGSTIYADSVKGRFTISRDNAKNTVYLQMNSLKPEDTAVYYCNGGWSLAMDYWGQGTSVTVS

SEQ ID NO: 285 - protein, 114 aa, synthetic construct
VQLVESGGGLVQPGGSLRLSCAASGSMFSINAVAWYRQAPGEQGEPVAAMTSGGSTIYADSVKGRFTISRDNAKNTVYLQMNSLKPEDTAVYYCNGGWSLAMDYWGQGTSVTVS

SEQ ID NO: 286 - protein, 114 aa, synthetic construct
VQLVESGGGLVQPGGSLRLSCAASGSMFSINAVAWYRQAPGEQMEPVAAMTSGGSTIYADSVKGRFTISRDNAKNTVYLQMNSLKPEDTAVYYCNGGWSLAMDYWGQGTSVTVS

SEQ ID NO: 287 - protein, 114 aa, synthetic construct
VQLVESGGGLVQPGGSLRLSCAASGSMFSINAVAWYRQAPGEQRDPVAAMTSGGSTIYADSVKGRFTISRDNAKNTVYLQMNSLKPEDTAVYYCNGGWSLAMDYWGQGTSVTVS

SEQ ID NO: 288 - protein, 114 aa, synthetic construct
VQLVESGGGLVQPGGSLRLSCAASGSMFSINAVAWYRQAPGEQREPAAAMTSGGSTIYADSVKGRFTISRDNAKNTVYLQMNSLKPEDTAVYYCNGGWSLAMDYWGQGTSVTVS

SEQ ID NO: 289 - protein, 114 aa, synthetic construct
VQLVESGGGLVQPGGSLRLSCAASGSMFSINAVAWYRQAPGEQREPVAAMASGGSTIYADSVKGRFTISRDNAKNTVYLQMNSLKPEDTAVYYCNGGWSLAMDYWGQGTSVTVS

SEQ ID NO: 290 - protein, 114 aa, synthetic construct
VQLVESGGGLVQPGGSLRLSCAASGSMFSINAVAWYRQAPGEQREPVAAMISGGSTIYADSVKGRFTISRDNAKNTVYLQMNSLKPEDTAVYYCNGGWSLAMDYWGQGTSVTVS

SEQ ID NO: 291 - protein, 114 aa, synthetic construct
VQLVESGGGLVQPGGSLRLSCAASGSMFSINAVAWYRQAPGEQREPVAAMTFGGSTIYADSVKGRFTISRDNAKNTVYLQMNSLKPEDTAVYYCNGGWSLAMDYWGQGTSVTVS

SEQ ID NO: 292 - protein, 114 aa, synthetic construct
VQLVESGGGLVQPGGSLRLSCAASGSMFSINAVAWYRQAPGEQREPVAAMTPGGSTIYADSVKGRFTISRDNAKNTVYLQMNSLKPEDTAVYYCNGGWSLAMDYWGQGTSVTVS

SEQ ID NO: 293 - protein, 114 aa, synthetic construct
VQLVESGGGLVQPGGSLRLSCAASGSMFSINAVAWYRQAPGEQREPVAAMTSGGGTIYADSVKGRFTISRDNAKNTVYLQMNSLKPEDTAVYYCNGGWSLAMDYWGQGTSVTVS

SEQ ID NO: 294 - protein, 114 aa, synthetic construct
VQLVESGGGLVQPGGSLRLSCAASGSMFSINAVAWYRQAPGEQREPVAAMTSGGITIYADSVKGRFTISRDNAKNTVYLQMNSLKPEDTAVYYCNGGWSLAMDYWGQGTSVTVS

SEQ ID NO: 295 - protein, 114 aa, synthetic construct
VQLVESGGGLVQPGGSLRLSCAASGSMFSINAVAWYRQAPGEQREPVAAMTSGGRTIYADSVKGRFTISRDNAKNTVYLQMNSLKPEDTAVYYCNGGWSLAMDYWGQGTSVTVS

SEQ ID NO: 296 - protein, 114 aa, synthetic construct
VQLVESGGGLVQPGGSLRLSCAASGSMFSINAVAWYRQAPGEQREPVAAMTSGGSAIYADSVKGRFTISRDNAKNTVYLQMNSLKPEDTAVYYCNGGWSLAMDYWGQGTSVTVS

SEQ ID NO: 297 - protein, 114 aa, synthetic construct
VQLVESGGGLVQPGGSLRLSCAASGSMFSINAVAWYRQAPGEQREPVAAMTSGGSIIYADSVKGRFTISRDNAKNTVYLQMNSLKPEDTAVYYCNGGWSLAMDYWGQGTSVTVS

SEQ ID NO: 298 - protein, 114 aa, synthetic construct
VQLVESGGGLVQPGGSLRLSCAASGSMFSINAVAWYRQAPGEQREPVAAMTSGGSTICADSVKGRFTISRDNAKNTVYLQMNSLKPEDTAVYYCNGGWSLAMDYWGQGTSVTVS

SEQ ID NO: 299 - protein, 114 aa, synthetic construct
VQLVESGGGLVQPGGSLRLSCAASGSMFSINAVAWYRQAPGEQREPVAAMTSGGSTIHADSVKGRFTISRDNAKNTVYLQMNSLKPEDTAVYYCNGGWSLAMDYWGQGTSVTVS

SEQ ID NO: 300 - protein, 114 aa, synthetic construct
VQLVESGGGLVQPGGSLRLSCAASGSMFSINAVAWYRQAPGEQREPVAAMTSGGSTIYADGVKGRFTISRDNAKNTVYLQMNSLKPEDTAVYYCNGGWSLAMDYWGQGTSVTVS

SEQ ID NO: 301 - protein, 114 aa, synthetic construct
VQLVESGGGLVQPGGSLRLSCAASGSMFSINAVAWYRQAPGEQREPVAAMTSGGSTIYADSAKGRFTISRDNAKNTVYLQMNSLKPEDTAVYYCNGGWSLAMDYWGQGTSVTVS

SEQ ID NO: 302 - protein, 114 aa, synthetic construct
VQLVESGGGLVQPGGSLRLSCAASGSMFSINAVAWYRQAPGEQREPVAAMTSGGSTIYADSGKGRFTISRDNAKNTVYLQMNSLKPEDTAVYYCNGGWSLAMDYWGQGTSVTVS

SEQ ID NO: 303 - protein, 114 aa, synthetic construct
VQLVESGGGLVQPGGSLRLSCAASGSMFSINAVAWYRQAPGEQREPVAAMTSGGSTIYADSIKGRFTISRDNAKNTVYLQMNSLKPEDTAVYYCNGGWSLAMDYWGQGTSVTVS

SEQ ID NO: 304 - protein, 114 aa, synthetic construct
VQLVESGGGLVQPGGSLRLSCAASGSMFSINAVAWYRQAPGEQREPVAAMTSGGSTIYADSVKERFTISRDNAKNTVYLQMNSLKPEDTAVYYCNGGWSLAMDYWGQGTSVTVS

SEQ ID NO: 305 - protein, 114 aa, synthetic construct
VQLVESGGGLVQPGGSLRLSCAASGSMFSINAVAWYRQAPGEQREPVAAMTSGGSTIYADSVKGLFTISRDNAKNTVYLQMNSLKPEDTAVYYCNGGWSLAMDYWGQGTSVTVS

SEQ ID NO: 306 - protein, 114 aa, synthetic construct
VQLVESGGGLVQPGGSLRLSCAASGSMFSINAVAWYRQAPGEQREPVAAMTSGGSTIYADSVKGRFAISRDNAKNTVYLQMNSLKPEDTAVYYCNGGWSLAMDYWGQGTSVTVS

SEQ ID NO: 307 - protein, 114 aa, synthetic construct
VQLVESGGGLVQPGGSLRLSCAASGSMFSINAVAWYRQAPGEQREPVAAMTSGGSTIYADSVKGRFIISRDNAKNTVYLQMNSLKPEDTAVYYCNGGWSLAMDYWGQGTSVTVS

SEQ ID NO: 308 - protein, 114 aa, synthetic construct
VQLVESGGGLVQPGGSLRLSCAASGSMFSINAVAWYRQAPGEQREPVAAMTSGGSTIYADSVKGRFKISRDNAKNTVYLQMNSLKPEDTAVYYCNGGWSLAMDYWGQGTSVTVS

SEQ ID NO: 309 - protein, 114 aa, synthetic construct
VQLVESGGGLVQPGGSLRLSCAASGSMFSINAVAWYRQAPGEQREPVAAMTSGGSTIYADSVKGRFSISRDNAKNTVYLQMNSLKPEDTAVYYCNGGWSLAMDYWGQGTSVTVS

SEQ ID NO: 310 - protein, 114 aa, synthetic construct
VQLVESGGGLVQPGGSLRLSCAASGSMFSINAVAWYRQAPGEQREPVAAMTSGGSTIYADSVKGRFTILRDNAKNTVYLQMNSLKPEDTAVYYCNGGWSLAMDYWGQGTSVTVS

SEQ ID NO: 311 - protein, 114 aa, synthetic construct
VQLVESGGGLVQPGGSLRLSCAASGSMFSINAVAWYRQAPGEQREPVAAMTSGGSTIYADSVKGRFTISLDNAKNTVYLQMNSLKPEDTAVYYCNGGWSLAMDYWGQGTSVTVS

SEQ ID NO: 312 - protein, 114 aa, synthetic construct
VQLVESGGGLVQPGGSLRLSCAASGSMFSINAVAWYRQAPGEQREPVAAMTSGGSTIYADSVKGRFTISQDNAKNTVYLQMNSLKPEDTAVYYCNGGWSLAMDYWGQGTSVTVS

SEQ ID NO: 313 - protein, 114 aa, synthetic construct
VQLVESGGGLVQPGGSLRLSCAASGSMFSINAVAWYRQAPGEQREPVAAMTSGGSTIYADSVKGRFTISRDDAKNTVYLQMNSLKPEDTAVYYCNGGWSLAMDYWGQGTSVTVS

SEQ ID NO: 314 - protein, 115 aa, synthetic construct
VQLVESGGGLVQPGGSLRLSCAASGSMFSINAVAWYRQAPGEQREPVAAMTSGGSTIYADSVKGRFTISRDKAKDTVYLQMNSLKPEDTAMYSCIYCRYDGEFAYWGQGTLVTVS

SEQ ID NO: 315 - protein, 114 aa, synthetic construct
VQLVESGGGLVQPGGSLRLSCAASGSMFSINAVAWYRQAPGEQREPVAAMTSGGSTIYADSVKGRFTISRDNAENTVYLQMNSLKPEDTAVYYCNGGWSLAMDYWGQGTSVTVS

SEQ ID NO: 316 - protein, 115 aa, synthetic construct
VQLVESGGGLVQPGGSLRLSCAASGSMFSINAVAWYRQAPGEQREPVAAMTSGGSTIYADSVKGRFTISRDNAKDTVYLQMNSLKPEDTAMYSCIYCRYDGEFAYWGQGTLVTVS

SEQ ID NO: 317 - protein, 114 aa, synthetic construct
VQLVESGGGLVQPGGSLRLSCAASGSMFSINAVAWYRQAPGEQREPVAAMTSGGSTIYADSVKGRFTISRDNAKDTVYLQMNSLKPEDTAVYYCNGGWSLAMDYWGQGTSVTVS

SEQ ID NO: 318 - protein, 114 aa, synthetic construct
VQLVESGGGLVQPGGSLRLSCAASGSMFSINAVAWYRQAPGEQREPVAAMTSGGSTIYADSVKGRFTISRDNAKNAVYLQMNSLKPEDTAVYYCNGGWSLAMDYWGQGTSVTVS

SEQ ID NO: 319 - protein, 114 aa, synthetic construct
VQLVESGGGLVQPGGSLRLSCAASGSMFSINAVAWYRQAPGEQREPVAAMTSGGSTIYADSVKGRFTISRDNAKNSVYLQMNSLKPEDTAVYYCNGGWSLAMDYWGQGTSVTVS

SEQ ID NO: 320 - protein, 114 aa, synthetic construct
VQLVESGGGLVQPGGSLRLSCAASGSMFSINAVAWYRQAPGEQREPVAAMTSGGSTIYADSVKGRFTISRDNAKNTAYLQMNSLKPEDTAVYYCNGGWSLAMDYWGQGTSVTVS

SEQ ID NO: 321 - protein, 114 aa, synthetic construct
VQLVESGGGLVQPGGSLRLSCAASGSMFSINAVAWYRQAPGEQREPVAAMTSGGSTIYADSVKGRFTISRDNAKNTIYLQMNSLKPEDTAVYYCNGGWSLAMDYWGQGTSVTVS

SEQ ID NO: 322 - protein, 114 aa, synthetic construct
VQLVESGGGLVQPGGSLRLSCAASGSMFSINAVAWYRQAPGEQREPVAAMTSGGSTIYADSVKGRFTISRDNAKNTVCLQMNSLKPEDTAVYYCNGGWSLAMDYWGQGTSVTVS

SEQ ID NO: 323 - protein, 114 aa, synthetic construct
VQLVESGGGLVQPGGSLRLSCAASGSMFSINAVAWYRQAPGEQREPVAAMTSGGSTIYADSVKGRFTISRDNAKNTVFLQMNSLKPEDTAVYYCNGGWSLAMDYWGQGTSVTVS

SEQ ID NO: 324 - protein, 114 aa, synthetic construct
VQLVESGGGLVQPGGSLRLSCAASGSMFSINAVAWYRQAPGEQREPVAAMTSGGSTIYADSVKGRFTISRDNAKNTVNLQMNSLKPEDTAVYYCNGGWSLAMDYWGQGTSVTVS

SEQ ID NO: 325 - protein, 114 aa, synthetic construct
VQLVESGGGLVQPGGSLRLSCAASGSMFSINAVAWYRQAPGEQREPVAAMTSGGSTIYADSVKGRFTISRDNAKNTVSLQMNSLKPEDTAVYYCNGGWSLAMDYWGQGTSVTVS

SEQ ID NO: 326 - protein, 114 aa, synthetic construct
VQLVESGGGLVQPGGSLRLSCAASGSMFSINAVAWYRQAPGEQREPVAAMTSGGSTIYADSVKGRFTISRDNAKNTVYFQMNSLKPEDTAVYYCNGGWSLAMDYWGQGTSVTVS

SEQ ID NO: 327 - protein, 114 aa, synthetic construct
VQLVESGGGLVQPGGSLRLSCAASGSMFSINAVAWYRQAPGEQREPVAAMTSGGSTIYADSVKGRFTISRDNAKNTVYLHMNSLKPEDTAVYYCNGGWSLAMDYWGQGTSVTVS

SEQ ID NO: 328 - protein, 114 aa, synthetic construct
VQLVESGGGLVQPGGSLRLSCAASGSMFSINAVAWYRQAPGEQREPVAAMTSGGSTIYADSVKGRFTISRDNAKNTVYLQINSLKPEDTAVYYCNGGWSLAMDYWGQGTSVTVS

SEQ ID NO: 329 - protein, 114 aa, synthetic construct
VQLVESGGGLVQPGGSLRLSCAASGSMFSINAVAWYRQAPGEQREPVAAMTSGGSTIYADSVKGRFTISRDNAKNTVYLQMDSLKPEDTAVYYCNGGWSLAMDYWGQGTSVTVS

SEQ ID NO: 330 - protein, 114 aa, synthetic construct
VQLVESGGGLVQPGGSLRLSCAASGSMFSINAVAWYRQAPGEQREPVAAMTSGGSTIYADSVKGRFTISRDNAKNTVYLQMNGLKPEDTAVYYCNGGWSLAMDYWGQGTSVTVS

SEQ ID NO: 331 - protein, 114 aa, synthetic construct
VQLVESGGGLVQPGGSLRLSCAASGSMFSINAVAWYRQAPGEQREPVAAMTSGGSTIYADSVKGRFTISRDNAKNTVYLQMNRLKPEDTAVYYCNGGWSLAMDYWGQGTSVTVS

SEQ ID NO: 332 - protein, 114 aa, synthetic construct
VQLVESGGGLVQPGGSLRLSCAASGSMFSINAVAWYRQAPGEQREPVAAMTSGGSTIYADSVKGRFTISRDNAKNTVYLQMNSLEPEDTAVYYCNGGWSLAMDYWGQGTSVTVS

SEQ ID NO: 333 - protein, 114 aa, synthetic construct
VQLVESGGGLVQPGGSLRLSCAASGSMFSINAVAWYRQAPGEQREPVAAMTSGGSTIYADSVKGRFTISRDNAKNTVYLQMNSLKPADTAVYYCNGGWSLAMDYWGQGTSVTVS

SEQ ID NO: 334 - protein, 114 aa, synthetic construct
VQLVESGGGLVQPGGSLRLSCAASGSMFSINAVAWYRQAPGEQREPVAAMTSGGSTIYADSVKGRFTISRDNAKNTVYLQMNSLKPDDTAVYYCNGGWSLAMDYWGQGTSVTVS

SEQ ID NO: 335 - protein, 114 aa, synthetic construct
VQLVESGGGLVQPGGSLRLSCAASGSMFSINAVAWYRQAPGEQREPVAAMTSGGSTIYADSVKGRFTISRDNAKNTVYLQMNSLKPEDAAVYYCNGGWSLAMDYWGQGTSVTVS

SEQ ID NO: 336 - protein, 114 aa, synthetic construct
VQLVESGGGLVQPGGSLRLSCAASGSMFSINAVAWYRQAPGEQREPVAAMTSGGSTIYADSVKGRFTISRDNAKNTVYLQMNSLKPEDKAVYYCNGGWSLAMDYWGQGTSVTVS

SEQ ID NO: 337 - protein, 115 aa, synthetic construct
VQLVESGGGLVQPGGSLRLSCAASGSMFSINAVAWYRQAPGEQREPVAAMTSGGSTIYADSVKGRFTISRDNAKNTVYLQMNSLKPEDTAMYSCIYCRYDGEFAYWGQGTLVTVS

SEQ ID NO: 338 - protein, 114 aa, synthetic construct
VQLVESGGGLVQPGGSLRLSCAASGSMFSINAVAWYRQAPGEQREPVAAMTSGGSTIYADSVKGRFTISRDNAKNTVYLQMNSLKPEDTAVCYCNGGWSLAMDYWGQGTSVTVS

SEQ ID NO: 339 - protein, 114 aa, synthetic construct
VQLVESGGGLVQPGGSLRLSCAASGSMFSINAVAWYRQAPGEQREPVAAMTSGGSTIYADSVKGRFTISRDNAKNTVYLQMNSLKPEDTAVNYCNGGWSLAMDYWGQGTSVTVS

SEQ ID NO: 340 - protein, 114 aa, synthetic construct
VQLVESGGGLVQPGGSLRLSCAASGSMFSINAVAWYRQAPGEQREPVAAMTSGGSTIYADSVKGRFTISRDNAKNTVYLQMNSLKPEDTAVSYCNGGWSLAMDYWGQGTSVTVS

SEQ ID NO: 341 - protein, 114 aa, synthetic construct
VQLVESGGGLVQPGGSLRLSCAASGSMFSINAVAWYRQAPGEQREPVAAMTSGGSTIYADSVKGRFTISRDNAKNTVYLQMNSLKPEDTAVYHCNGGWSLAMDYWGQGTSVTVS

SEQ ID NO: 342 - protein, 114 aa, synthetic construct
VQLVESGGGLVQPGGSLRLSCAASGSMFSINAVAWYRQAPGEQREPVAAMTSGGSTIYADSVKGRFTISRDNAKNTVYLQMNSLKPEDTAVYSCNGGWSLAMDYWGQGTPVTVS

SEQ ID NO: 343 - protein, 114 aa, synthetic construct
VQLVESGGGLVQPGGSLRLSCAASGSMFSINAVAWYRQAPGEQREPVAAMTSGGSTIYADSVKGRFTISRDNAKNTVYLQMNSLKPEDTAVYSCNGGWSLAMDYWGQGTSVTVS

SEQ ID NO: 344 - protein, 114 aa, synthetic construct
VQLVESGGGLVQPGGSLRLSCAASGSMFSINAVAWYRQAPGEQREPVAAMTSGGSTIYADSVKGRFTISRDNAKNTVYLQMNSLKPEDTAVYYCDGGWSLAMDYWGQGTSVTVS

SEQ ID NO: 345 - protein, 114 aa, synthetic construct
VQLVESGGGLVQPGGSLRLSCAASGSMFSINAVAWYRQAPGEQREPVAAMTSGGSTIYADSVKGRFTISRDNAKNTVYLQMNSLKPEDTAVYYCHGGWSLAMDYWGPGTSVTVS

SEQ ID NO: 346 - protein, 114 aa, synthetic construct
VQLVESGGGLVQPGGSLRLSCAASGSMFSINAVAWYRQAPGEQREPVAAMTSGGSTIYADSVKGRFTISRDNAKNTVYLQMNSLKPEDTAVYYCHGGWSLAMDYWGQGTSVTVS

SEQ ID NO: 347 - protein, 114 aa, synthetic construct
VQLVESGGGLVQPGGSLRLSCAASGSMFSINAVAWYRQAPGEQREPVAAMTSGGSTIYADSVKGRFTISRDNAKNTVYLQMNSLKPEDTAVYYCNGEWSLAMDYWGQGTSVTVS

SEQ ID NO: 348 - protein, 114 aa, synthetic construct
VQLVESGGGLVQPGGSLRLSCAASGSMFSINAVAWYRQAPGEQREPVAAMTSGGSTIYADSVKGRFTISRDNAKNTVYLQMNSLKPEDTAVYYCNGGLSLAMDYWGQGTSVTVS

SEQ ID NO: 349 - protein, 114 aa, synthetic construct
VQLVESGGGLVQPGGSLRLSCAASGSMFSINAVAWYRQAPGEQREPVAAMTSGGSTIYADSVKGRFTISRDNAKNTVYLQMNSLKPEDTAVYYCNGGRSLAMDYWGQGTSVTVS

SEQ ID NO: 350 - protein, 114 aa, synthetic construct
VQLVESGGGLVQPGGSLRLSCAASGSMFSINAVAWYRQAPGEQREPVAAMTSGGSTIYADSVKGRFTISRDNAKNTVYLQMNSLKPEDTAVYYCNGGWALAMDYWGQGTSVTVS

SEQ ID NO: 351 - protein, 114 aa, synthetic construct
VQLVESGGGLVQPGGSLRLSCAASGSMFSINAVAWYRQAPGEQREPVAAMTSGGSTIYADSVKGRFTISRDNAKNTVYLQMNSLKPEDTAVYYCNGGWLLAMDYWGQGTSVTVS

SEQ ID NO: 352 - protein, 114 aa, synthetic construct
VQLVESGGGLVQPGGSLRLSCAASGSMFSINAVAWYRQAPGEQREPVAAMTSGGSTIYADSVKGRFTISRDNAKNTVYLQMNSLKPEDTAVYYCNGGWPLAMDYWGQGTSVTVS

SEQ ID NO: 353 - protein, 114 aa, synthetic construct
VQLVESGGGLVQPGGSLRLSCAASGSMFSINAVAWYRQAPGEQREPVAAMTSGGSTIYADSVKGRFTISRDNAKNTVYLQMNSLKPEDTAVYYCNGGWSLALDYWGQGTSVTVS

SEQ ID NO: 354 - protein, 114 aa, synthetic construct
VQLVESGGGLVQPGGSLRLSCAASGSMFSINAVAWYRQAPGEQREPVAAMTSGGSTIYADSVKGRFTISRDNAKNTVYLQMNSLKPEDTAVYYCNGGWSLAMDCWGQGTSVTVS

SEQ ID NO: 355 - protein, 114 aa, synthetic construct
VQLVESGGGLVQPGGSLRLSCAASGSMFSINAVAWYRQAPGEQREPVAAMTSGGSTIYADSVKGRFTISRDNAKNTVYLQMNSLKPEDTAVYYCNGGWSLAMDDWGQGTSVTVS

SEQ ID NO: 356 - protein, 114 aa, synthetic construct
VQLVESGGGLVQPGGSLRLSCAASGSMFSINAVAWYRQAPGEQREPVAAMTSGGSTIYADSVKGRFTISRDNAKNTVYLQMNSLKPEDTAVYYCNGGWSLAMDFWGQGTSVTVS

SEQ ID NO: 357 - protein, 114 aa, synthetic construct
VQLVESGGGLVQPGGSLRLSCAASGSMFSINAVAWYRQAPGEQREPVAAMTSGGSTIYADSVKGRFTISRDNAKNTVYLQMNSLKPEDTAVYYCNGGWSLAMDHWGQGTSVTVS

SEQ ID NO: 358 - protein, 114 aa, synthetic construct
VQLVESGGGLVQPGGSLRLSCAASGSMFSINAVAWYRQAPGEQREPVAAMTSGGSTIYADSVKGRFTISRDNAKNTVYLQMNSLKPEDTAVYYCNGGWSLAMDYCGQGTSVTVS

SEQ ID NO: 359 - protein, 114 aa, synthetic construct
VQLVESGGGLVQPGGSLRLSCAASGSMFSINAVAWYRQAPGEQREPVAAMTSGGSTIYADSVKGRFTISRDNAKNTVYLQMNSLKPEDTAVYYCNGGWSLAMDYLGQGTSVTVS

SEQ ID NO: 360 - protein, 114 aa, synthetic construct
VQLVESGGGLVQPGGSLRLSCAASGSMFSINAVAWYRQAPGEQREPVAAMTSGGSTIYADSVKGRFTISRDNAKNTVYLQMNSLKPEDTAVYYCNGGWSLAMDYRGQGTSVTVS

SEQ ID NO: 361 - protein, 114 aa, synthetic construct
VQLVESGGGLVQPGGSLRLSCAASGSMFSINAVAWYRQAPGEQREPVAAMTSGGSTIYADSVKGRFTISRDNAKNTVYLQMNSLKPEDTAVYYCNGGWSLAMDYWGHGTSVTVS

SEQ ID NO: 362 - protein, 114 aa, synthetic construct
VQLVESGGGLVQPGGSLRLSCAASGSMFSINAVAWYRQAPGEQREPVAAMTSGGSTIYADSVKGRFTISRDNAKNTVYLQMNSLKPEDTAVYYCNGGWSLAMDYWGLGTSVTVS

SEQ ID NO: 363 - protein, 114 aa, synthetic construct
VQLVESGGGLVQPGGSLRLSCAASGSMFSINAVAWYRQAPGEQREPVAAMTSGGSTIYADSVKGRFTISRDNAKNTVYLQMNSLKPEDTAVYYCNGGWSLAMDYWGPGTSVTVS

SEQ ID NO: 364 - protein, 114 aa, synthetic construct
VQLVESGGGLVQPGGSLRLSCAASGSMFSINAVAWYRQAPGEQREPVAAMTSGGSTIYADSVKGRFTISRDNAKNTVYLQMNSLKPEDTAVYYCNGGWSLAMDYWGQGASVTVS

SEQ ID NO: 365 - protein, 114 aa, synthetic construct
VQLVESGGGLVQPGGSLRLSCAASGSMFSINAVAWYRQAPGEQREPVAAMTSGGSTIYADSVKGRFTISRDNAKNTVYLQMNSLKPEDTAVYYCNGGWSLAMDYWGQGNSVTVS

SEQ ID NO: 366 - protein, 114 aa, synthetic construct
VQLVESGGGLVQPGGSLRLSCAASGSMFSINAVAWYRQAPGEQREPVAAMTSGGSTIYADSVKGRFTISRDNAKNTVYLQMNSLKPEDTAVYYCNGGWSLAMDYWGQGTLVTVS

SEQ ID NO: 367 - protein, 114 aa, synthetic construct
VQLVESGGGLVQPGGSLRLSCAASGSMFSINAVAWYRQAPGEQREPVAAMTSGGSTIYADSVKGRFTISRDNAKNTVYLQMNSLKPEDTAVYYCNGGWSLAMDYWGQGTPVTVS

SEQ ID NO: 368 - protein, 114 aa, synthetic construct
VQLVESGGGLVQPGGSLRLSCAASGSMFSINAVAWYRQAPGEQREPVAAMTSGGSTIYADSVKGRFTISRDNAKNTVYLQMNSLKPEDTAVYYCNGGWSLAMDYWGQGTSATVS

SEQ ID NO: 369 - protein, 114 aa, synthetic construct
VQLVESGGGLVQPGGSLRLSCAASGSMFSINAVAWYRQAPGEQREPVAAMTSGGSTIYADSVKGRFTISRDNAKNTVYLQMNSLKPEDTAVYYCNGGWSLAMDYWGQGTSDTVS

SEQ ID NO: 370 - protein, 114 aa, synthetic construct
VQLVESGGGLVQPGGSLRLSCAASGSMFSINAVAWYRQAPGEQREPVAAMTSGGSTIYADSVKGRFTISRDNAKNTVYLQMNSLKPEDTAVYYCNGGWSLAMDYWGQGTSGTGS

SEQ ID NO: 371 - protein, 114 aa, synthetic construct
VQLVESGGGLVQPGGSLRLSCAASGSMFSINAVAWYRQAPGEQREPVAAMTSGGSTIYADSVKGRFTISRDNAKNTVYLQMNSLKPEDTAVYYCNGGWSLAMDYWGQGTSGTVS

SEQ ID NO: 372 - protein, 114 aa, synthetic construct
VQLVESGGGLVQPGGSLRLSCAASGSMFSINAVAWYRQAPGEQREPVAAMTSGGSTIYADSVKGRFTISRDNAKNTVYLQMNSLKPEDTAVYYCNGGWSLAMDYWGQGTSVAVS

SEQ ID NO: 373 - protein, 114 aa, synthetic construct
VQLVESGGGLVQPGGSLRLSCAASGSMFSINAVAWYRQAPGEQREPVAAMTSGGSTIYADSVKGRFTISRDNAKNTVYLQMNSLKPEDTAVYYCNGGWSLAMDYWGQGTSVTAP

SEQ ID NO: 374 - protein, 114 aa, synthetic construct
VQLVESGGGLVQPGGSLRLSCAASGSMFSINAVAWYRQAPGEQREPVAAMTSGGSTIYADSVKGRFTISRDNAKNTVYLQMNSLKPEDTAVYYCNGGWSLAMDYWGQGTSVTAS

SEQ ID NO: 375 - protein, 114 aa, synthetic construct
VQLVESGGGLVQPGGSLRLSCAASGSMFSINAVAWYRQAPGEQREPVAAMTSGGSTIYADSVKGRFTISRDNAKNTVYLQMNSLKPEDTAVYYCNGGWSLAMDYWGQGTSVTDS

SEQ ID NO: 376 - protein, 114 aa, synthetic construct
VQLVESGGGLVQPGGSLRLSCAASGSMFSINAVAWYRQAPGEQREPVAAMTSGGSTIYADSVKGRFTISRDNAKNTVYLQMNSLKPEDTAVYYCNGGWSLAMDYWGQGTSVTIS

SEQ ID NO: 377 - protein, 114 aa, synthetic construct
VQLVESGGGLVQPGGSLRLSCAASGSMFSINAVAWYRQAPGEQREPVAAMTSGGSTIYADSVKGRFTISRDNAKNTVYLQMNSLKPEDTAVYYCNGGWSLAMDYWGQGTSVTSP

SEQ ID NO: 378 - protein, 114 aa, synthetic construct
VQLVESGGGLVQPGGSLRLSCAASGSMFSINAVAWYRQAPGEQREPVAAMTSGGSTIYADSVKGRFTISRDNAKNTVYLQMNSLKPEDTAVYYCNGGWSLAMDYWGQGTSVTVP

SEQ ID NO: 379 - protein, 114 aa, synthetic construct
VQLVESGGGLVQPGGSLRLSCAASGSMFSINAVAWYRQAPGEQREPVAAMTSGGSTIYADSVKGRFTISRDNAKNTVYLQMNSLKPEDTAVYYCNGGWSLAMDYWGQGTSVTVS

SEQ ID NO: 380 - protein, 114 aa, synthetic construct
VQLVESGGGLVQPGGSLRLSCAASGSMFSINAVAWYRQAPGEQREPVAAMTSGGSTIYADSVKGRFTISRDNAKNTVYLQMNSLKPEDTAVYYCNGGWSLAMDYWGQGTTVTVS

SEQ ID NO: 381 - protein, 114 aa, synthetic construct
VQLVESGGGLVQPGGSLRLSCAASGSMFSINAVAWYRQAPGEQREPVAAMTSGGSTIYADSVKGRFTISRDNAKNTVYLQMNSLKPEDTAVYYCNGGWSLAMDYWGQVTSVTVS

SEQ ID NO: 382 - protein, 114 aa, synthetic construct
VQLVESGGGLVQPGGSLRLSCAASGSMFSINAVAWYRQAPGEQREPVAAMTSGGSTIYADSVKGRFTISRDNAKNTVYLQMNSLKPEDTAVYYCNGGWSLAMDYWGRGTSVTVS

SEQ ID NO: 383 - protein, 114 aa, synthetic construct
VQLVESGGGLVQPGGSLRLSCAASGSMFSINAVAWYRQAPGEQREPVAAMTSGGSTIYADSVKGRFTISRDNAKNTVYLQMNSLKPEDTAVYYCNGGWSLAMGYWGQGTSVTVS

SEQ ID NO: 384 - protein, 114 aa, synthetic construct
VQLVESGGGLVQPGGSLRLSCAASGSMFSINAVAWYRQAPGEQREPVAAMTSGGSTIYADSVKGRFTISRDNAKNTVYLQMNSLKPEDTAVYYCNGGWSLAMNYWGQGTSVTVS

SEQ ID NO: 385 - protein, 114 aa, synthetic construct
VQLVESGGGLVQPGGSLRLSCAASGSMFSINAVAWYRQAPGEQREPVAAMTSGGSTIYADSVKGRFTISRDNAKNTVYLQMNSLKPEDTAVYYCNGGWSLAMVYWGQGTSVTVS

SEQ ID NO: 386 - protein, 114 aa, synthetic construct
VQLVESGGGLVQPGGSLRLSCAASGSMFSINAVAWYRQAPGEQREPVAAMTSGGSTIYADSVKGRFTISRDNAKNTVYLQMNSLKPEDTAVYYCNGGWSLAMYYWGQGTSVTVS

SEQ ID NO: 387 - protein, 114 aa, synthetic construct
VQLVESGGGLVQPGGSLRLSCAASGSMFSINAVAWYRQAPGEQREPVAAMTSGGSTIYADSVKGRFTISRDNAKNTVYLQMNSLKPEDTAVYYCNGGWSLAVDYWGQGTSVTVS

SEQ ID NO: 388 - protein, 114 aa, synthetic construct
VQLVESGGGLVQPGGSLRLSCAASGSMFSINAVAWYRQAPGEQREPVAAMTSGGSTIYADSVKGRFTISRDNAKNTVYLQMNSLKPEDTAVYYCNGGWSLPMDYWGQGTSVTVS

SEQ ID NO: 389 - protein, 114 aa, synthetic construct
VQLVESGGGLVQPGGSLRLSCAASGSMFSINAVAWYRQAPGEQREPVAAMTSGGSTIYADSVKGRFTISRDNAKNTVYLQMNSLKPEDTAVYYCNGGWSLVMDYWGQGTSVTVS

SEQ ID NO: 390 - protein, 114 aa, synthetic construct
VQLVESGGGLVQPGGSLRLSCAASGSMFSINAVAWYRQAPGEQREPVAAMTSGGSTIYADSVKGRFTISRDNAKNTVYLQMNSLKPEDTAVYYCNGGWSQAMDYWGQGTSVTVS

SEQ ID NO: 391 - protein, 114 aa, synthetic construct
VQLVESGGGLVQPGGSLRLSCAASGSMFSINAVAWYRQAPGEQREPVAAMTSGGSTIYADSVKGRFTISRDNAKNTVYLQMNSLKPEDTAVYYCNGGWTLAMDYWGQGTSVTVS

SEQ ID NO: 392 - protein, 114 aa, synthetic construct
VQLVESGGGLVQPGGSLRLSCAASGSMFSINAVAWYRQAPGEQREPVAAMTSGGSTIYADSVKGRFTISRDNAKNTVYLQMNSLKPEDTAVYYCNRGWSLAMDYWGQGTSVTVS

SEQ ID NO: 393 - protein, 114 aa, synthetic construct
VQLVESGGGLVQPGGSLRLSCAASGSMFSINAVAWYRQAPGEQREPVAAMTSGGSTIYADSVKGRFTISRDNAKNTVYLQMNSLKPEDTAVYYCNVGWSLAMDYWGQGTSVTVS

SEQ ID NO: 394 - protein, 114 aa, synthetic construct
VQLVESGGGLVQPGGSLRLSCAASGSMFSINAVAWYRQAPGEQREPVAAMTSGGSTIYADSVKGRFTISRDNAKNTVYLQMNSLKPEDTAVYYCSGGWSLAMDYWGQGTSVTVS

SEQ ID NO: 395 - protein, 114 aa, synthetic construct
VQLVESGGGLVQPGGSLRLSCAASGSMFSINAVAWYRQAPGEQREPVAAMTSGGSTIYADSVKGRFTISRDNAKNTVYLQMNSLKPEDTAVYYCTGGWSLAMDYWGQGTSVTVS

SEQ ID NO: 396 - protein, 119 aa, synthetic construct
VQLVESGGGLVQPGGSLRLSCAASGSMFSINAVAWYRQAPGEQREPVAAMTSGGSTIYADSVKGRFTISRDNAKNTVYLQMNSLKPEDTAVYYCYAQGYDYDEGYGMDYWGQGTSVTVS

SEQ ID NO: 397 - protein, 114 aa, synthetic construct
VQLVESGGGLVQPGGSLRLSCAASGSMFSINAVAWYRQAPGEQREPVAAMTSGGSTIYADSVKGRFTISRDNAKNTVYLQMNSLKPEDTAVYYFNGGWSLAMDYWGQGTSVTVS

SEQ ID NO: 398 - protein, 114 aa, synthetic construct
VQLVESGGGLVQPGGSLRLSCAASGSMFSINAVAWYRQAPGEQREPVAAMTSGGSTIYADSVKGRFTISRDNAKNTVYLQMNSLKPEDTAVYYSNGGWSLAMDYWGQGTSVTVS

SEQ ID NO: 399 - protein, 119 aa, synthetic construct
VQLVESGGGLVQPGGSLRLSCAASGSMFSINAVAWYRQAPGEQREPVAAMTSGGSTIYADSVKGRFTISRDNAKNTVYLQMNSLKPEETAVYYCYAQGYDYDEGYGMDYWGQGTSVTVS

SEQ ID NO: 400 - protein, 114 aa, synthetic construct
VQLVESGGGLVQPGGSLRLSCAASGSMFSINAVAWYRQAPGEQREPVAAMTSGGSTIYADSVKGRFTISRDNAKNTVYLQMNSLKPEYTAVYYCNGGWSLAMDYWGQGTSVTVS

SEQ ID NO: 401 - protein, 114 aa, synthetic construct
VQLVESGGGLVQPGGSLRLSCAASGSMFSINAVAWYRQAPGEQREPVAAMTSGGSTIYADSVKGRFTISRDNAKNTVYLQMNSLKPGDTAVYYCNGGWSLAMDYWGQGTSVTVS

SEQ ID NO: 402 - protein, 114 aa, synthetic construct
VQLVESGGGLVQPGGSLRLSCAASGSMFSINAVAWYRQAPGEQREPVAAMTSGGSTIYADSVKGRFTISRDNAKNTVYLQMNSLKPKDTAVYYCNGGWSLAMDYWGQGTSVTVS

SEQ ID NO: 403 - protein, 114 aa, synthetic construct
VQLVESGGGLVQPGGSLRLSCAASGSMFSINAVAWYRQAPGEQREPVAAMTSGGSTIYADSVKGRFTISRDNAKNTVYLQMNSSKPEDTAVYYCNGGWSLAMDYWGQGTSVTVS

SEQ ID NO: 404 - protein, 114 aa, synthetic construct
VQLVESGGGLVQPGGSLRLSCAASGSMFSINAVAWYRQAPGEQREPVAAMTSGGSTIYADSVKGRFTISRDNAKNTVYLQMSSLKPEDTAVYYCNGGWSLAMDYWGQGTSVTVS

SEQ ID NO: 405 - protein, 114 aa, synthetic construct
VQLVESGGGLVQPGGSLRLSCAASGSMFSINAVAWYRQAPGEQREPVAAMTSGGSTIYADSVKGRFTISRDNAKNTVYLQTNSLKPEDTAVYYCNGGWSLAMDYWGQGTSVTVS

SEQ ID NO: 406 - protein, 114 aa, synthetic construct
VQLVESGGGLVQPGGSLRLSCAASGSMFSINAVAWYRQAPGEQREPVAAMTSGGSTIYADSVKGRFTISRDNAKNTVYLQVNSLKPEDTAVYYCNGGWSLAMDYWGQGTSVTVS

SEQ ID NO: 407 - protein, 114 aa, synthetic construct
VQLVESGGGLVQPGGSLRLSCAASGSMFSINAVAWYRQAPGEQREPVAAMTSGGSTIYADSVKGRFTISRDNAKNTVYPQMNSLKPEDTAVYYCNGGWSLAMDYWGQGTSVTVS

SEQ ID NO: 408 - protein, 114 aa, synthetic construct
VQLVESGGGLVQPGGSLRLSCAASGSMFSINAVAWYRQAPGEQREPVAAMTSGGSTIYADSVKGRFTISRDNAKTTVYLQMNSLKPEDTAVYYCNGGWSLAMDYWGQGTSVTVS

SEQ ID NO: 409 - protein, 114 aa, synthetic construct
VQLVESGGGLVQPGGSLRLSCAASGSMFSINAVAWYRQAPGEQREPVAAMTSGGSTIYADSVKGRFTISRDNAKTTVYLQMNSLKPEDTAVYYCNGGWSLAMDYWGQVTSVTVS

SEQ ID NO: 410 - protein, 114 aa, synthetic construct
VQLVESGGGLVQPGGSLRLSCAASGSMFSINAVAWYRQAPGEQREPVAAMTSGGSTIYADSVKGRFTISRDNATNTVYLQMNSLKPEDTAVYYCNGGWSLAMDYWGQGTSVTVS

SEQ ID NO: 411 - protein, 114 aa, synthetic construct
VQLVESGGGLVQPGGSLRLSCAASGSMFSINAVAWYRQAPGEQREPVAAMTSGGSTIYADSVKGRFTISRDNDKNTVYLQMNSLKPEDTAVYYCNGGWSLAMDYWGQGTSVTVS

SEQ ID NO: 412 - protein, 114 aa, synthetic construct
VQLVESGGGLVQPGGSLRLSCAASGSMFSINAVAWYRQAPGEQREPVAAMTSGGSTIYADSVKGRFTISRDNVKNTVYLQMNSLKPEDTAVYYCNGGWSLAMDYWGQGTSVTVS

SEQ ID NO: 413 - protein, 114 aa, synthetic construct
VQLVESGGGLVQPGGSLRLSCAASGSMFSINAVAWYRQAPGEQREPVAAMTSGGSTIYADSVKGRFTISRDYAKNTVYLQMNSLKPEDTAVYYCNGGWSLAMDYWGQGTSVTVS

SEQ ID NO: 414 - protein, 114 aa, synthetic construct
VQLVESGGGLVQPGGSLRLSCAASGSMFSINAVAWYRQAPGEQREPVAAMTSGGSTIYADSVKGRFTISRGNAKNTVYLQMNSLKPEDTAVYYCNGGWSLAMDYWGQGTSVTVS

SEQ ID NO: 415 - protein, 114 aa, synthetic construct
VQLVESGGGLVQPGGSLRLSCAASGSMFSINAVAWYRQAPGEQREPVAAMTSGGSTIYADSVKGRFTISRVNAKNTVYLQMNSLKPEDTAVYYCNGGWSLAMDYWGQGTSVTVS

SEQ ID NO: 416 - protein, 114 aa, synthetic construct
VQLVESGGGLVQPGGSLRLSCAASGSMFSINAVAWYRQAPGEQREPVAAMTSGGSTIYADSVKGRFTLSRDNAKNTVYLQMNSLKPEDTAVYYCNGGWSLAMDYWGQGTSVTVS

SEQ ID NO: 417 - protein, 115 aa, synthetic construct
VQLVESGGGLVQPGGSLRLSCAASGSMFSINAVAWYRQAPGEQREPVAAMTSGGSTIYADSVKGRFTVSKDKAKDTVYLQMNSLKPEDTAMYSCIYCRYDGEFAYWGQGTLVTVS

SEQ ID NO: 418 - protein, 114 aa, synthetic construct
VQLVESGGGLVQPGGSLRLSCAASGSMFSINAVAWYRQAPGEQREPVAAMTSGGSTIYADSVKGRSTISRDNAKNTVYLQMNSLKPEDTAVYYCNGGWSLAMDYWGQGTSVTVS

SEQ ID NO: 419 - protein, 114 aa, synthetic construct
VQLVESGGGLVQPGGSLRLSCAASGSMFSINAVAWYRQAPGEQREPVAAMTSGGSTIYADSVMGRFTISRDNAKNTVYLQMNSLKPEDTAVYYCNGGWSLAMDYWGQGTSVTVS

SEQ ID NO: 420 - protein, 119 aa, synthetic construct
VQLVESGGGLVQPGGSLRLSCAASGSMFSINAVAWYRQAPGEQREPVAAMTSGGSTIYADSVRGRFTISKGNARNTLYLQMNSLKPEDTAVYFCAASPRQLGPYYAMDYWGQGTSVTVS

SEQ ID NO: 421 - protein, 114 aa, synthetic construct
VQLVESGGGLVQPGGSLRLSCAASGSMFSINAVAWYRQAPGEQREPVAAMTSGGSTIYADSVTGRFTISRDNAKNTVYLQMNSLKPEDTAVYYCNGGWSLAMDYWGQGTSVTVS

SEQ ID NO: 422 - protein, 114 aa, synthetic construct
VQLVESGGGLVQPGGSLRLSCAASGSMFSINAVAWYRQAPGEQREPVAAMTSGGSTIYANSVKGRFTISRDNAKNTVYLQMNSLKPEDTAVYYCNGGWSLAMDYWGQGTSVTVS

SEQ ID NO: 423 - protein, 114 aa, synthetic construct
VQLVESGGGLVQPGGSLRLSCAASGSMFSINAVAWYRQAPGEQREPVAAMTSGGSTIYAYSVKGRFTISRDNAKNTVYLQMNSLKPEDTAVYYCNGGWSLAMDYWGQGTSVTVS

SEQ ID NO: 424 - protein, 114 aa, synthetic construct
VQLVESGGGLVQPGGSLRLSCAASGSMFSINAVAWYRQAPGEQREPVAAMTSGGSTIYTDSVKGRFTISRDNAKNTVYLQMNSLKPEDTAVYYCNGGWSLAMDYWGQGTSVTVS

SEQ ID NO: 425 - protein, 114 aa, synthetic construct
VQLVESGGGLVQPGGSLRLSCAASGSMFSINAVAWYRQAPGEQREPVAAMTSGGSTTYADSVKGRFTISRDNAKNTVYLQMNSLKPEDTAVYYCNGGWSLAMDYWGQGTSVTVS

SEQ ID NO: 426 - protein, 114 aa, synthetic construct
VQLVESGGGLVQPGGSLRLSCAASGSMFSINAVAWYRQAPGEQREPVAAMTSGGSTVYADSVKGRFTISRDNAKNTVYLQMNSLKPEDTAVYYCNGGWSLAMDYWGQGTSVTVS

SEQ ID NO: 427 - protein, 114 aa, synthetic construct
VQLVESGGGLVQPGGSLRLSCAASGSMFSINAVAWYRQAPGEQREPVAAMTSGVSTIYADSVKGRFTISRDNAKNTVYLQMNSLKPEDTAVYYCNGGWSLAMDYWGQGTSVTVS

SEQ ID NO: 428 - protein, 114 aa, synthetic construct
VQLVESGGGLVQPGGSLRLSCAASGSMFSINAVAWYRQAPGEQREPVAATTSGGSTIYADSVKGRFTISRDNAKNTVYLQMNSLKPEDTAVYYCNGGWSLAMDYWGQGTSVTVS

SEQ ID NO: 429 - protein, 114 aa, synthetic construct
VQLVESGGGLVQPGGSLRLSCAASGSMFSINAVAWYRQAPGEQREPVAEMTSGGSTIYADSVKGRFTISRDNAKNTVYLQMNSLKPEDTAVYYCNGGWSLAMDYWGQGTSVTVS

SEQ ID NO: 430 - protein, 114 aa, synthetic construct
VQLVESGGGLVQPGGSLRLSCAASGSMFSINAVAWYRQAPGEQREPVASMTSGGSTIYADSVKGRFTISRDNAKNTVYLQMNSLKPEDTAVYYCNGGWSLAMDYWGQGTSVTVS

SEQ ID NO: 431 - protein, 114 aa, synthetic construct
VQLVESGGGLVQPGGSLRLSCAASGSMFSINAVAWYRQAPGEQREPVATMTSGGSTIYADSVKGRFTISRDNAKNTVYLQMNSLKPEDTAVYYCNGGWSLAMDYWGQGTSVTVS

SEQ ID NO: 432 - protein, 114 aa, synthetic construct
VQLVESGGGLVQPGGSLRLSCAASGSMFSINAVAWYRQAPGEQREPVAVMTSGGSTIYADSVKGRFTISRDNAKNTVYLQMNSLKPEDTAVYYCNGGWSLAMDYWGQGTSVTVS

SEQ ID NO: 433 - protein, 114 aa, synthetic construct
VQLVESGGGLVQPGGSLRLSCAASGSMFSINAVAWYRQAPGEQREPVSAMTSGGSTIYADSVKGRFTISRDNAKNTVYLQMNSLKPEDTAVYYCNGGWSLAMDYWGQGTSVTVS

SEQ ID NO: 434 - protein, 114 aa, synthetic construct
VQLVESGGGLVQPGGSLRLSCAASGSMFSINAVAWYRQAPGEQREPVTAMTSGGSTIYADSVKGRFTISRDNAKNTVYLQMNSLKPEDTAVYYCNGGWSLAMDYWGQGTSVTVS

SEQ ID NO: 435 - protein, 114 aa, synthetic construct
VQLVESGGGLVQPGGSLRLSCAASGSMFSINAVAWYRQAPGEQREPVVAMTSGGSTIYADSVKGRFTISRDNAKNTVYLQMNSLKPEDTAVYYCNGGWSLAMDYWGQGTSVTVS

SEQ ID NO: 436 - protein, 114 aa, synthetic construct
VQLVESGGGLVQPGGSLRLSCAASGSMFSINAVAWYRQAPGEQREQVAAMTSGGSTIYADSVKGRFTISRDNAKNTVYLQMNSLKPEDTAVYYCNGGWSLAMDYWGQGTSVTVS

SEQ ID NO: 437 - protein, 114 aa, synthetic construct
VQLVESGGGLVQPGGSLRLSCAASGSMFSINAVAWYRQAPGEQWEPVAAMTSGGSTIYADSVKGRFTISRDNAKNTVYLQMNSLKPEDTAVYYCNGGWSLAMDYWGQGTSVTVS

SEQ ID NO: 438 - protein, 114 aa, synthetic construct
VQLVESGGGLVQPGGSLRLSCAASGSMFSINAVAWYRQAPGERREPVAAMTSGGSTIYADSVKGRFTISRDNAKNTVYLQMNSLKPEDTAVYYCNGGWSLAMDYWGQGTSVTVS

SEQ ID NO: 439 - protein, 114 aa, synthetic construct
VQLVESGGGLVQPGGSLRLSCAASGSMFSINAVAWYRQAPGGQREPVAAMTSGGSTIYADSVKGRFTISRDNAKNTVYLQMNSLKPEDTAVYYCNGGWSLAMDYWGQGTSVTVS

SEQ ID NO: 440 - protein, 115 aa, synthetic construct
VQLVESGGGLVQPGGSLRLSCAASGSMFSINAVAWYRQAPGKQREPVAAMTSGGSTIYADSVKGRFTISRDNAKNTVYLQMNSLKPEDTAMYSCIYCRYDGEFAYWGQGTLVTVS

SEQ ID NO: 441 - protein, 114 aa, synthetic construct
VQLVESGGGLVQPGGSLRLSCAASGSMFSINAVAWYRQAPGKQREPVAAMTSGGSTIYADSVKGRFTISRDNAKNTVYLQMNSLKPEDTAVYYCNGGWSLAMDYWGQGTSVTVS

SEQ ID NO: 442 - protein, 114 aa, synthetic construct
VQLVESGGGLVQPGGSLRLSCAASGSMFSINAVAWYRQAPSEQREPVAAMTSGGSTIYADSVKGRFTISRDNAKNTVYLQMNSLKPEDTAVYYCNGGWSLAMDYWGQGTSVTVS

SEQ ID NO: 443 - protein, 114 aa, synthetic construct
VQLVESGGGLVQPGGSLRLSCAASGSMFSINAVAWYRQASGEQREPVAAMTSGGSTIYADSVKGRFTISRDNAKNTVYLQMNSLKPEDTAVYYCNGGWSLAMDYWGQGTSVTVS

SEQ ID NO: 444 - protein, 114 aa, synthetic construct
VQLVESGGGLVQPGGSLRLSCAASGSMFSINAVAWYRQVPGEQREPVAAMTSGGSTIYADSVKGRFTISRDNAKNTVYLQMNSLKPEDTAVYYCNGGWSLAMDYWGQGTSVTVS

SEQ ID NO: 445 - protein, 114 aa, synthetic construct
VQLVESGGGLVQPGGSLRLSCAASGSMFSINAVAWYRRAPGEQREPVAAMTSGGSTIYADSVKGRFTISRDNAKNTVYLQMNSLKPEDTAVYYCNGGWSLAMDYWGQGTSVTVS

SEQ ID NO: 446 - protein, 114 aa, synthetic construct
VQLVESGGGLVQPGGSLRLSCAASGSMFSINAVGWYRQAPGEQREPVAAMTSGGSTIYADSVKGRFTISRDNAKNTVYLQMNSLKPEDTAVYYCNGGWSLAMDYWGPGTSVTVS

SEQ ID NO: 447 - protein, 114 aa, synthetic construct
VQLVESGGGLVQPGGSLRLSCAASGSMFSINAVGWYRQAPGEQREPVAAMTSGGSTIYADSVKGRFTISRDNAKNTVYLQMNSLKPEDTAVYYCNGGWSLAMDYWGQGASVTVS

SEQ ID NO: 448 - protein, 114 aa, synthetic construct
VQLVESGGGLVQPGGSLRLSCAASGSMFSINAVGWYRQAPGEQREPVAAMTSGGSTIYADSVKGRFTISRDNAKNTVYLQMNSLKPEDTAVYYCNGGWSLAMDYWGQGTSVTVS

SEQ ID NO: 449 - protein, 114 aa, synthetic construct
VQLVESGGGLVQPGGSLRLSCAASGSMFSINAVGWYRQAPGEQREPVAAMTSGGSTIYADSVKGRFTISRDNAKNTVYLQMNSLKPEDTAVYYCNGGWSLAMDYWGQGTTVTVS

SEQ ID NO: 450 - protein, 114 aa, synthetic construct
VQLVESGGGLVQPGGSLRLSCAASGSMFSINAVGWYRQAPGEQREPVAAMTSGGSTIYADSVKGRFTISRDNAKTTVYLQMNSLKPEDTAVYYCNGGWSLAMDYWGQGTSVTVS

SEQ ID NO: 451 - protein, 114 aa, synthetic construct
VQLVESGGGLVQPGGSLRLSCAASGSMFSINAVGWYRQAPGEQREPVAAMTSGGSTIYADSVKRRFTISRDNAKNTVYLQMNSLKPEDTAVYYCNGGWSLAMDYWGQGTSVTVS

SEQ ID NO: 452 - protein, 114 aa, synthetic construct
VQLVESGGGLVQPGGSLRLSCAASGSMFSINAVGWYRQAPGKQREPVAAMTSGGSTIYADSVKGRFTISRDNAKNTIYLQMNSLKPEDTAVYYCNGGWSLAMDYWGQGTSVTVS

SEQ ID NO: 453 - protein, 114 aa, synthetic construct
VQLVESGGGLVQPGGSLRLSCAASGSMFSINAVGWYRQAPGKQREPVAAMTSGGSTIYADSVKGRFTISRDNAKNTVHLQMNSLKPEDTAVYYCNGGWSLAMDYWGQGTSVTVS

SEQ ID NO: 454 - protein, 114 aa, synthetic construct
VQLVESGGGLVQPGGSLRLSCAASGSMFSINAVGWYRQAPGKQREPVAAMTSGGSTIYADSVKGRFTISRDNAKNTVYLQINSLKPEDTAVYYCNGGWSLAMDYWGQGTSVTVS

SEQ ID NO: 455 - protein, 115 aa, synthetic construct
VQLVESGGGLVQPGGSLRLSCAASGSMFSINAVGWYRQAPGKQREPVAAMTSGGSTIYADSVKGRFTISRDNAKNTVYLQMNSLKPEDTAMYSCIYCRYDGEFAYWGQGTLVTVS

SEQ ID NO: 456 - protein, 114 aa, synthetic construct
VQLVESGGGLVQPGGSLRLSCAASGSMFSINAVGWYRQAPGKQREPVAAMTSGGSTIYADSVKGRFTISRDNAKNTVYLQMNSLKPEDTAVSYCNGGWSLAMDYWGQGTSVTVS

SEQ ID NO: 457 - protein, 114 aa, synthetic construct
VQLVESGGGLVQPGGSLRLSCAASGSMFSINAVGWYRQAPGKQREPVAAMTSGGSTIYADSVKGRFTISRDNAKNTVYLQMNSLKPEDTAVYYCNGGRSLAMDYWGQGTSVTVS

SEQ ID NO: 458 - protein, 114 aa, synthetic construct
VQLVESGGGLVQPGGSLRLSCAASGSMFSINAVGWYRQAPGKQREPVAAMTSGGSTIYADSVKGRFTISRDNAKNTVYLQMNSLKPEDTAVYYCNGGWSLAMDYWGHGTSVTVS

SEQ ID NO: 459 - protein, 114 aa, synthetic construct
VQLVESGGGLVQPGGSLRLSCAASGSMFSINAVGWYRQAPGKQREPVAAMTSGGSTIYADSVKGRFTISRDNAKNTVYLQMNSLKPEDTAVYYCNGGWSLAMDYWGPGTSVTVS

SEQ ID NO: 460 - protein, 114 aa, synthetic construct
VQLVESGGGLVQPGGSLRLSCAASGSMFSINAVGWYRQAPGKQREPVAAMTSGGSTIYADSVKGRFTISRDNAKNTVYLQMNSLKPEDTAVYYCNGGWSLAMDYWGQGASVTVS

SEQ ID NO: 461 - protein, 114 aa, synthetic construct
VQLVESGGGLVQPGGSLRLSCAASGSMFSINAVGWYRQAPGKQREPVAAMTSGGSTIYADSVKGRFTISRDNAKNTVYLQMNSLKPEDTAVYYCNGGWSLAMDYWGQGTLVTVS

SEQ ID NO: 462 - protein, 114 aa, synthetic construct
VQLVESGGGLVQPGGSLRLSCAASGSMFSINAVGWYRQAPGKQREPVAAMTSGGSTIYADSVKGRFTISRDNAKNTVYLQMNSLKPEDTAVYYCNGGWSLAMDYWGQGTPVTVS

SEQ ID NO: 463 - protein, 114 aa, synthetic construct
VQLVESGGGLVQPGGSLRLSCAASGSMFSINAVGWYRQAPGKQREPVAAMTSGGSTIYADSVKGRFTISRDNAKNTVYLQMNSLKPEDTAVYYCNGGWSLAMDYWGQGTSVTVA

SEQ ID NO: 464 - protein, 114 aa, synthetic construct
VQLVESGGGLVQPGGSLRLSCAASGSMFSINAVGWYRQAPGKQREPVAAMTSGGSTIYADSVKGRFTISRDNAKNTVYLQMNSLKPEDTAVYYCNGGWSLAMDYWGQGTSVTVS

SEQ ID NO: 465 - protein, 114 aa, synthetic construct
VQLVESGGGLVQPGGSLRLSCAASGSMFSINAVGWYRQAPGKQREPVAAMTSGGSTIYADSVKGRFTISRDNAKNTVYLQMNSLKPEDTAVYYCNGGWSLAMDYWGQGTTVTVS

SEQ ID NO: 466 - protein, 114 aa, synthetic construct
VQLVESGGGLVQPGGSLRLSCAASGSMFSINAVGWYRQAPGKQREPVAAMTSGGSTIYADSVKGRFTISRDNAKNTVYLQMNSLKPEDTAVYYCNGGWSLAMDYWGQVTSVTVS

SEQ ID NO: 467 - protein, 114 aa, synthetic construct
VQLVESGGGLVQPGGSLRLSCAASGSMFSINAVGWYRQAPGKQREPVAAMTSGGSTIYADSVKGRFTISRDNAKNTVYLQMNSLKPEDTAVYYCNVGWSLAMDYWGQGTSVTVS

SEQ ID NO: 468 - protein, 114 aa, synthetic construct
VQLVESGGGLVQPGGSLRLSCAASGSMFSINAVGWYRQAPGKQREPVAAMTSGGSTIYADSVKGRFTISRDNAKNTVYLQMNSLRPEDTAVYYCNGGWSLAMDYWGQGTSVTVS

SEQ ID NO: 469 - protein, 114 aa, synthetic construct
VQLVESGGGLVQPGGSLRLSCAASGSMFSINAVGWYRQAPGKQREPVAAMTSGGSTIYADSVKGRFTISRDNAKNTVYLRMNSLKPEDTAVYYCNGGWSLAMDYWGQGTSVTVS

SEQ ID NO: 470 - protein, 114 aa, synthetic construct
VQLVESGGGLVQPGGSLRLSCAASGSMFSINAVGWYRQAPGKQREPVAAMTSGGSTIYADSVKGRFTISRDNAKTTVYLQMNSLKPEDTAVYYCNGGWSLAMDYWGQGTSVTVS

SEQ ID NO: 471 - protein, 114 aa, synthetic construct
VQLVESGGGLVQPGGSLRLSCAASGSMFSINAVGWYRQAPGKQREPVASMTSGGSTIYADSVKGRFTISRDNAKNTVYLQMNSLKPEDTAVYYCNGGWSLAMDYWGQGTSVTVS

SEQ ID NO: 472 - protein, 114 aa, synthetic construct
VQLVESGGGLVQPGGSLRLSCAASGSMFSINAVGWYRQAPGKQREPVATMTSGGSTIYADSVKGRFTISRDNAKNTVYLQMNSLKPEDTAVYYCNGGWSLAMDYWGQGTSVTVS

SEQ ID NO: 473 - protein, 114 aa, synthetic construct
VQLVESGGGLVQPGGSLRLSCAASGSMFSINVVAWYRQAPGEQREPVAAMTSGGSTIYADSVKGRFTISRDNAKNTVYLQMNSLKPEDTAVYYCNGGWSLAMDYWGQGTSVTVS

SEQ ID NO: 474 - protein, 114 aa, synthetic construct
VQLVESGGGLVQPGGSLRLSCAASGSMFSIYAVAWYRQAPGEQREPVAAMTSGGSTIYADSVKGRFTISRDNAKNTVYLQMNSLKPEDTAVYYCNGGWSLAMDYWGQGTSVTVS

SEQ ID NO: 475 - protein, 114 aa, synthetic construct
VQLVESGGGLVQPGGSLRLSCAASGSMFSLNAVAWYRQAPGEQREPVAAMTSGGSTIYADSVKGRFTISRDNAKNTVYLQMNSLKPEDTAVYYCNGGWSLAMDYWGQGTSVTVS

SEQ ID NO: 476 - protein, 114 aa, synthetic construct
VQLVESGGGLVQPGGSLRLSCAASGSMFSMNAVAWYRQAPGEQREPVAAMTSGGSTIYADSVKGRFTISRDNAKNTVYLQMNSLKPEDTAVYYCNGGWSLAMDYWGQGTSVTVS

SEQ ID NO: 477 - protein, 114 aa, synthetic construct
VQLVESGGGLVQPGGSLRLSCAASGSMFSTNAVAWYRQAPGEQREPVAAMTSGGSTIYADSVKGRFTISRDNAKNTVYLQMNSLKPEDTAVYYCNGGWSLAMDYWGQGTSVTVS

SEQ ID NO: 478 - protein, 114 aa, synthetic construct
VQLVESGGGLVQPGGSLRLSCAASGSMFSVNAVAWYRQAPGEQREPVAAMTSGGSTIYADSVKGRFTISRDNAKNTVYLQMNSLKPEDTAVYYCNGGWSLAMDYWGQGTSVTVS

SEQ ID NO: 479 - protein, 114 aa, synthetic construct
VQLVESGGGLVQPGGSLRLSCAASGSMLSINAVAWYRQAPGEQREPVAAMTSGGSTIYADSVKGRFTISRDNAKNTVYLQMNSLKPEDTAVYYCNGGWSLAMDYWGQGTSVTVS

SEQ ID NO: 480 - protein, 114 aa, synthetic construct
VQLVESGGGLVQPGGSLRLSCAASGSMSSINAVAWYRQAPGEQREPVAAMTSGGSTIYADSVKGRFTISRDNAKNTVYLQMNSLKPEDTAVYYCNGGWSLAMDYWGQGTSVTVS

SEQ ID NO: 481 - protein, 114 aa, synthetic construct
VQLVESGGGLVQPGGSLRLSCAASGSMVSINAVAWYRQAPGEQREPVAAMTSGGSTIYADSVKGRFTISRDNAKNTVYLQMNSLKPEDTAVYYCNGGWSLAMDYWGQGTSVTVS

SEQ ID NO: 482 - protein, 114 aa, synthetic construct
VQLVESGGGLVQPGGSLRLSCAASGSMVSINAVGWYRQAPGEQREPVAAMTSGGSTIYADSVKGRFTISRDNAKNTVYLQMNSLKPEDTAVYYCNGGWSLAMDYWGQGTSVTVS

SEQ ID NO: 483 - protein, 114 aa, synthetic construct
VQLVESGGGLVQPGGSLRLSCAASGSMVSINAVGWYRQAPGKQREPVAAMTSGGSTIYADSVKGRFTISRDNAKNTVYLQMNSLKPEDTAVYYCNGGWSLAMDYWGQGTSVTVS

SEQ ID NO: 484 - protein, 114 aa, synthetic construct
VQLVESGGGLVQPGGSLRLSCAASGSRFSINAVAWYRQAPGEQREPVAAMTSGGSTIYADSVKGRFTISRDNAKNTVYLQMNSLKPEDTAVYYCNGGWSLAMDYWGQGTSVTVS

SEQ ID NO: 485 - protein, 114 aa, synthetic construct
VQLVESGGGLVQPGGSLRLSCAASSSMFSINAVAWYRQAPGEQREPVAAMTSGGSTIYADSVKGRFTISRDNAKNTVYLQMNSLKPEDTAVYYCNGGWSLAMDYWGQGTSVTVS

SEQ ID NO: 486 - protein, 114 aa, synthetic construct
VQLVESGGGLVQPGGSLRLSCATSGSMFSINAVAWYRQAPGEQREPVAAMTSGGSTIYADSVKGRFTISRDNAKNTVYLQMNSLKPEDTAVYYCNGGWSLAMDYWGQGTSVTVS

SEQ ID NO: 487 - protein, 114 aa, synthetic construct
VQLVESGGGLVQPGGSLRLSCAVSGSMFSINAVAWYRQAPGEQREPVAAMTSGGSTIYADSVKGRFTISRDNAKNTVYLQMNSLKPEDTAVYYCNGGWSLAMDYWGQGTSVTVS

SEQ ID NO: 488 - protein, 114 aa, synthetic construct
VQLVESGGGLVQPGGSLRLSCTASGSMFSINAVAWYRQAPGEQREPVAAMTSGGSTIYADSVKGRFTISRDNAKNTVYLQMNSLKPEDTAVYYCNGGWSLAMDYWGQGTSVTVS

SEQ ID NO: 489 - protein, 114 aa, synthetic construct
VQLVESGGGLVQPGGSLRLSCTASGSMFSINAVGWYRQAPGKQREPVAAMTSGGSTIYADSVKGRFTISRDNAKNTVYLQMNSLKPEDTAVYYCNGGWSLAMDYWGQGTSVTVS

SEQ ID NO: 490 - protein, 114 aa, synthetic construct
VQLVESGGGLVQPGGSLRLSRAASGSMFSINAVAWYRQAPGEQREPVAAMTSGGSTIYADSVKGRFTISRDNAKNTVYLQMNSLKPEDTAVYYCNGGWSLAMDYWGQGTSVTVS

SEQ ID NO: 491 - protein, 114 aa, synthetic construct
VQLVESGGGLVQPGGSLRPSCAASGSMFSINAVAWYRQAPGEQREPVAAMTSGGSTIYADSVKGRFTISRDNAKNTVYLQMNSLKPEDTAVYYCNGGWSLAMDYWGQGTSVTVS

SEQ ID NO: 492 - protein, 114 aa, synthetic construct
VQLVESGGGLVQPGGSPRLSCAASGSMFSINAVAWYRQAPGEQREPVAAMTSGGSTIYADSVKGRFTISRDNAKNTVYLQMNSLKPEDTAVYYCNGGWSLAMDYWGQGTSVTVS

SEQ ID NO: 493 - protein, 114 aa, synthetic construct
VQLVESGGGLVQPGRSLRLSCAASGSMFSINAVAWYRQAPGEQREPVAAMTSGGSTIYADSVKGRFTISRDNAKNTVYLQMNSLKPEDTAVYYCNGGWSLAMDYWGQGTSVTVS

SEQ ID NO: 494 - protein, 114 aa, synthetic construct
VQLVESGGGLVQPSGSLRLSCAASGSMFSINAVAWYRQAPGEQREPVAAMTSGGSTIYADSVKGRFTISRDNAKNTVYLQMNSLKPEDTAVYYCNGGWSLAMDYWGQGTSVTVS

SEQ ID NO: 495 - protein, 114 aa, synthetic construct
VQLVESGGGLVQPVGSLRLSCAASGSMFSINAVAWYRQAPGEQREPVAAMTSGGSTIYADSVKGRFTISRDNAKNTVYLQMNSLKPEDTAVYYCNGGWSLAMDYWGQGTSVTVS

SEQ ID NO: 496 - protein, 114 aa, synthetic construct
VQLVESGGGLVQSGGSLRLSCAASGSMFSINAVAWYRQAPGEQREPVAAMTSGGSTIYADSVKGRFTISRDNAKNTVYLQMNSLKPEDTAVYYCNGGWSLAMDYWGQGTSVTVS

SEQ ID NO: 497 - protein, 114 aa, synthetic construct
VQLVESGGGLVRPGGSLRLSCAASGSMFSINAVAWYRQAPGEQREPVAAMTSGGSTIYADSVKGRFTISRDNAKNTVYLQMNSLKPEDTAVYYCNGGWSLAMDYWGQGTSVTVS

SEQ ID NO: 498 - protein, 114 aa, synthetic construct
VQLVESGGGSVQPGGSLRLSCAASGSMFSINAVAWYRQAPGEQREPVAAMTSGGSTIYADSVKGRFTISRDNAKNTVYLQMNSLKPEDTAVYYCNGGWSLAMDYWGQGTSVTVS

SEQ ID NO: 499 - protein, 114 aa, synthetic construct
VQLVESGGVLVQPGGSLRLSCAASGSMFSINAVAWYRQAPGEQREPVAAMTSGGSTIYADSVKGRFTISRDNAKNTVYLQMNSLKPEDTAVYYCNGGWSLAMDYWGQGTSVTVS

SEQ ID NO: 500 - protein, 114 aa, synthetic construct
VQLVESGRGLVQPGGSLRLSCAASGSMFSINAVAWYRQAPGEQREPVAAMTSGGSTIYADSVKGRFTISRDNAKNTVYLQMNSLKPEDTAVYYCNGGWSLAMDYWGQGTSVTVS

SEQ ID NO: 501 - protein, 114 aa, synthetic construct
VQLVESVGGLVQPGGSLRLSCAASGSMFSINAVAWYRQAPGEQREPVAAMTSGGSTIYADSVKGRFTISRDNAKNTVYLQMNSLKPEDTAVYYCNGGWSLAMDYWGQGTSVTVS

SEQ ID NO: 502 - protein, 114 aa, synthetic construct
VQLVKSGGGLVQPGGSLRLSCAASGSMFSINAVAWYRQAPGEQREPVAAMTSGGSTIYADSVKGRFTISRDNAKNTVYLQMNSLKPEDTAVYYCNGGWSLAMDYWGQGTSVTVS

SEQ ID NO: 503 - protein, 114 aa, synthetic construct
VQLVVSGGGLVQPGGSLRLSCAASGSMFSINAVAWYRQAPGEQREPVAAMTSGGSTIYADSVKGRFTISRDNAKNTVYLQMNSLKPEDTAVYYCNGGWSLAMDYWGQGTSVTVS

SEQ ID NO: 504 - protein, 114 aa, synthetic construct
DVQLVESGGGLVQAGETLRLSCTASGFTFDDSDMGWYRQAPGDECELVSTISSDGSTNYADSVKGRFTISQDNAKNTVYLQMTSLKPEDTAIYSCRTMASRIGCWGQGTLVTVS

SEQ ID NO: 505 - protein, 114 aa, synthetic construct
DVQLVESGGGSVQAGETLRLSCTASGFTFDDSDMGWYRQAPGDECELVSTISSDGSTNYADSVKGRFTISQDNAKNTVYLQMTSLKPEDTAIYSCRTMASRIGCWGQGTLVTVS

SEQ ID NO: 506 - protein, 114 aa, synthetic construct
EAQLVESGGGSVQAGETLRLSCTASGFTFDDSDMGWYRQAPGDECELVSTISSDGSTNYADSVKGRFTISQDNAKNTVYLQMTSLKPEDTAIYSCRTMASRIGCWGQGTLVTVS

SEQ ID NO: 507 - protein, 114 aa, synthetic construct
EDQLVESGGGSVQAGETLRLSCTASGFTFDDSDMGWYRQAPGDECELVSTISSDGSTNYADSVKGRFTISQDNAKNTVYLQMTSLKPEDTAIYSCRTMASRIGCWGQGTLVTVS

SEQ ID NO: 508 - protein, 114 aa, synthetic construct
EFQLVESGGGSVQAGETLRLSCTASGFTFDDSDMGWYRQAPGDECELVSTISSDGSTNYADSVKGRFTISQDNAKNTVYLQMTSLKPEDTAIYSCRTMASRIGCWGQGTLVTVS

SEQ ID NO: 509 - protein, 114 aa, synthetic construct
EGQLVESGGGSVQAGETLRLSCTASGFTFDDSDMGWYRQAPGDECELVSTISSDGSTNYADSVKGRFTISQDNAKNTVYLQMTSLKPEDTAIYSCRTMASRIGCWGQGTLVTVS

SEQ ID NO: 510 - protein, 114 aa, synthetic construct
EVELVESGGGSVQAGETLRLSCTASGFTFDDSDMGWYRQAPGDECELVSTISSDGSTNYADSVKGRFTISQDNAKNTVYLQMTSLKPEDTAIYSCRTMASRIGCWGQGTLVTVS

SEQ ID NO: 511 - protein, 114 aa, synthetic construct
EVHLVESGGGSVQAGETLRLSCTASGFTFDDSDMGWYRQAPGDECELVSTISSDGSTNYADSVKGRFTISQDNAKNTVYLQMTSLKPEDTAIYSCRTMASRIGCWGQGTLVTVS

SEQ ID NO: 512 - protein, 114 aa, synthetic construct
EVKLVESGGGSVQAGETLRLSCTASGFTFDDSDMGWYRQAPGDECELVSTISSDGSTNYADSVKGRFTISQDNAKNTVYLQMTSLKPEDTAIYSCRTMASRIGCWGQGTLVTVS

SEQ ID NO: 513 - protein, 114 aa, synthetic construct
EVQFVESGGGSVQAGETLRLSCTASGFTFDDSDMGWYRQAPGDECELVSTISSDGSTNYADSVKGRFTISQDNAKNTVYLQMTSLKPEDTAIYSCRTMASRIGCWGQGTLVTVS

SEQ ID NO: 514 - protein, 114 aa, synthetic construct
EVQIVESGGGSVQAGETLRLSCTASGFTFDDSDMGWYRQAPGDECELVSTISSDGSTNYADSVKGRFTISQDNAKNTVYLQMTSLKPEDTAIYSCRTMASRIGCWGQGTLVTVS

SEQ ID NO: 515 - protein, 114 aa, synthetic construct
EVQLAESGGGSVQAGETLRLSCTASGFTFDDSDMGWYRQAPGDECELVSTISSDGSTNYADSVKGRFTISQDNAKNTVYLQMTSLKPEDTAIYSCRTMASRIGCWGQGTLVTVS

SEQ ID NO: 516 - protein, 114 aa, synthetic construct
EVQLDESGGGSVQAGETLRLSCTASGFTFDDSDMGWYRQAPGDECELVSTISSDGSTNYADSVKGRFTISQDNAKNTVYLQMTSLKPEDTAIYSCRTMASRIGCWGQGTLVTVS

SEQ ID NO: 517 - protein, 114 aa, synthetic construct
EVQLFESGGGSVQAGETLRLSCTASGFTFDDSDMGWYRQAPGDECELVSTISSDGSTNYADSVKGRFTISQDNAKNTVYLQMTSLKPEDTAIYSCRTMASRIGCWGQGTLVTVS

SEQ ID NO: 518 - protein, 114 aa, synthetic construct
EVQLIESGGGSVQAGETLRLSCTASGFTFDDSDMGWYRQAPGDECELVSTISSDGSTNYADSVKGRFTISQDNAKNTVYLQMTSLKPEDTAIYSCRTMASRIGCWGQGTLVTVS

SEQ ID NO: 519 - protein, 114 aa, synthetic construct
EVQLVDSGGGSVQAGETLRLSCTASGFTFDDSDMGWYRQAPGDECELVSTISSDGSTNYADSVKGRFTISQDNAKNTVYLQMTSLKPEDTAIYSCRTMASRIGCWGQGTLVTVS

SEQ ID NO: 520 - protein, 114 aa, synthetic construct
EVQLVELGGGSVQAGETLRLSCTASGFTFDDSDMGWYRQAPGDECELVSTISSDGSTNYADSVKGRFTISQDNAKNTVYLQMTSLKPEDTAIYSCRTMASRIGCWGQGTLVTVS

SEQ ID NO: 521 - protein, 114 aa, synthetic construct
EVQLVEPGGGSVQAGETLRLSCTASGFTFDDSDMGWYRQAPGDECELVSTISSDGSTNYADSVKGRFTISQDNAKNTVYLQMTSLKPEDTAIYSCRTMASRIGCWGQGTLVTVS

SEQ ID NO: 522 - protein, 114 aa, synthetic construct
EVQLVESAGGSVQAGETLRLSCTASGFTFDDSDMGWYRQAPGDECELVSTISSDGSTNYADSVKGRFTISQDNAKNTVYLQMTSLKPEDTAIYSCRTMASRIGCWGQGTLVTVS

SEQ ID NO: 523 - protein, 114 aa, synthetic construct
EVQLVESCGGSVQAGETLRLSCTASGFTFDDSDMGWYRQAPGDECELVSTISSDGSTNYADSVKGRFTISQDNAKNTVYLQMTSLKPEDTAIYSCRTMASRIGCWGQGTLVTVS

SEQ ID NO: 524 - protein, 114 aa, synthetic construct
EVQLVESDGGSVQAGETLRLSCTASGFTFDDSDMGWYRQAPGDECELVSTISSDGSTNYADSVKGRFTISQDNAKNTVYLQMTSLKPEDTAIYSCRTMASRIGCWGQGTLVTVS

SEQ ID NO: 525 - protein, 114 aa, synthetic construct
EVQLVESGCGSVQAGETLRLSCTASGFTFDDSDMGWYRQAPGDECELVSTISSDGSTNYADSVKGRFTISQDNAKNTVYLQMTSLKPEDTAIYSCRTMASRIGCWGQGTLVTVS

SEQ ID NO: 526 - protein, 114 aa, synthetic construct
EVQLVESGDGSVQAGETLRLSCTASGFTFDDSDMGWYRQAPGDECELVSTISSDGSTNYADSVKGRFTISQDNAKNTVYLQMTSLKPEDTAIYSCRTMASRIGCWGQGTLVTVS

SEQ ID NO: 527 - protein, 114 aa, synthetic construct
EVQLVESGGASVQAGETLRLSCTASGFTFDDSDMGWYRQAPGDECELVSTISSDGSTNYADSVKGRFTISQDNAKNTVYLQMTSLKPEDTAIYSCRTMASRIGCWGQGTLVTVS

SEQ ID NO: 528 - protein, 114 aa, synthetic construct
EVQLVESGGESVQAGETLRLSCTASGFTFDDSDMGWYRQAPGDECELVSTISSDGSTNYADSVKGRFTISQDNAKNTVYLQMTSLKPEDTAIYSCRTMASRIGCWGQGTLVTVS

SEQ ID NO: 529 - protein, 114 aa, synthetic construct
EVQLVESGGGGVQAGETLRLSCTASGFTFDDSDMGWYRQAPGDECELVSTISSDGSTNYADSVKGRFTISQDNAKNTVYLQMTSLKPEDTAIYSCRTMASRIGCWGQGTLVTVS

SEQ ID NO: 530 - protein, 114 aa, synthetic construct
EVQLVESGGGIVQAGETLRLSCTASGFTFDDSDMGWYRQAPGDECELVSTISSDGSTNYADSVKGRFTISQDNAKNTVYLQMTSLKPEDTAIYSCRTMASRIGCWGQGTLVTVS

SEQ ID NO: 531 - protein, 114 aa, synthetic construct
EVQLVESGGGRVQAGETLRLSCTASGFTFDDSDMGWYRQAPGDECELVSTISSDGSTNYADSVKGRFTISQDNAKNTVYLQMTSLKPEDTAIYSCRTMASRIGCWGQGTLVTVS

SEQ ID NO: 532 - protein, 114 aa, synthetic construct
EVQLVESGGGSAQAGETLRLSCTASGFTFDDSDMGWYRQAPGDECELVSTISSDGSTNYADSVKGRFTISQDNAKNTVYLQMTSLKPEDTAIYSCRTMASRIGCWGQGTLVTVS

SEQ ID NO: 533 - protein, 114 aa, synthetic construct
EVQLVESGGGSDQAGETLRLSCTASGFTFDDSDMGWYRQAPGDECELVSTISSDGSTNYADSVKGRFTISQDNAKNTVYLQMTSLKPEDTAIYSCRTMASRIGCWGQGTLVTVS

SEQ ID NO: 534 - protein, 114 aa, synthetic construct
EVQLVESGGGSFQAGETLRLSCTASGFTFDDSDMGWYRQAPGDECELVSTISSDGSTNYADSVKGRFTISQDNAKNTVYLQMTSLKPEDTAIYSCRTMASRIGCWGQGTLVTVS

SEQ ID NO: 535 - protein, 114 aa, synthetic construct
EVQLVESGGGSIQAGETLRLSCTASGFTFDDSDMGWYRQAPGDECELVSTISSDGSTNYADSVKGRFTISQDNAKNTVYLQMTSLKPEDTAIYSCRTMASRIGCWGQGTLVTVS

SEQ ID NO: 536 - protein, 114 aa, synthetic construct
EVQLVESGGGSVQAGDTLRLSCTASGFTFDDSDMGWYRQAPGDECELVSTISSDGSTNYADSVKGRFTISQDNAKNTVYLQMTSLKPEDTAIYSCRTMASRIGCWGQGTLVTVS

SEQ ID NO: 537 - protein, 114 aa, synthetic construct
EVQLVESGGGSVQAGEILRLSCTASGFTFDDSDMGWYRQAPGDECELVSTISSDGSTNYADSVKGRFTISQDNAKNTVYLQMTSLKPEDTAIYSCRTMASRIGCWGQGTLVTVS

SEQ ID NO: 538 - protein, 114 aa, synthetic construct
EVQLVESGGGSVQAGENLRLSCTASGFTFDDSDMGWYRQAPGDECELVSTISSDGSTNYADSVKGRFTISQDNAKNTVYLQMTSLKPEDTAIYSCRTMASRIGCWGQGTLVTVS

SEQ ID NO: 539 - protein, 114 aa, synthetic construct
EVQLVESGGGSVQAGENLRLSCTASGFTFDDSDMGWYRQAPGDECELVSTISSDGSTNYADSVKGRFTISQDNAKNTVYLQMTSLKPEDTAIYSCRTMASRIGCWGQVTLVTVS

SEQ ID NO: 540 - protein, 114 aa, synthetic construct
EVQLVESGGGSVQAGETFRLSCTASGFTFDDSDMGWYRQAPGDECELVSTISSDGSTNYADSVKGRFTISQDNAKNTVYLQMTSLKPEDTAIYSCRTMASRIGCWGQGTLVTVS

SEQ ID NO: 541 - protein, 114 aa, synthetic construct
EVQLVESGGGSVQAGETLLLSCTASGFTFDDSDMGWYRQAPGDECELVSTISSDGSTNYADSVKGRFTISQDNAKNTVYLQMTSLKPEDTAIYSCRTMASRIGCWGQGTLVTVS

SEQ ID NO: 542 - protein, 114 aa, synthetic construct
EVQLVESGGGSVQAGETLPLSCTASGFTFDDSDMGWYRQAPGDECELVSTISSDGSTNYADSVKGRFTISQDNAKNTVYLQMTSLKPEDTAIYSCRTMASRIGCWGQGTLVTVS

SEQ ID NO: 543 - protein, 114 aa, synthetic construct
EVQLVESGGGSVQAGETLQLSCTASGFTFDDSDMGWYRQAPGDECELVSTISSDGSTNYADSVKGRFTISQDNAKNTVYLQMTSLKPEDTAIYSCRTMASRIGCWGQGTLVTVS

SEQ ID NO: 544 - protein, 114 aa, synthetic construct
EVQLVESGGGSVQAGETLRFSCTASGFTFDDSDMGWYRQAPGDECELVSTISSDGSTNYADSVKGRFTISQDNAKNTVYLQMTSLKPEDTAIYSCRTMASRIGCWGQGTLVTVS

SEQ ID NO: 545 - protein, 114 aa, synthetic construct
EVQLVESGGGSVQAGETLRLFCTASGFTFDDSDMGWYRQAPGDECELVSTISSDGSTNYADSVKGRFTISQDNAKNTVYLQMTSLKPEDTAIYSCRTMASRIGCWGQGTLVTVS

SEQ ID NO: 546 - protein, 114 aa, synthetic construct
EVQLVESGGGSVQAGETLRLPCTASGFTFDDSDMGWYRQAPGDECELVSTISSDGSTNYADSVKGRFTISQDNAKNTVYLQMTSLKPEDTAIYSCRTMASRIGCWGQGTLVTVS

SEQ ID NO: 547 - protein, 114 aa, synthetic construct
EVQLVESGGGSVQAGETLRLSCAASGFTFDDSDMGWYRQAPGDECELVSTISSDGSTNYADSVKGRFTISQDNAKNTVYLQMTSLKPEDTAIYSCRTMASRIGCWGQGTLVTVS

SEQ ID NO: 548 - protein, 114 aa, synthetic construct
EVQLVESGGGSVQAGETLRLSCIASGFTFDDSDMGWYRQAPGDECELVSTISSDGSTNYADSVKGRFTISQDNAKNTVYLQMTSLKPEDTAIYSCRTMASRIGCWGQGTLVTVS

SEQ ID NO: 549 - protein, 114 aa, synthetic construct
EVQLVESGGGSVQAGETLRLSCNASGFTFDDSDMGWYRQAPGDECELVSTISSDGSTNYADSVKGRFTISQDNAKNTVYLQMTSLKPEDTAIYSCRTMASRIGCWGQGTLVTVS

SEQ ID NO: 550 - protein, 114 aa, synthetic construct
EVQLVESGGGSVQAGETLRLSCSASGFTFDDSDMGWYRQAPGDECELVSTISSDGSTNYADSVKGRFTISQDNAKNTVYLQMTSLKPEDTAIYSCRTMASRIGCWGQGTLVTVS

SEQ ID NO: 551 - protein, 114 aa, synthetic construct
EVQLVESGGGSVQAGETLRLSCTAFGFTFDDSDMGWYRQAPGDECELVSTISSDGSTNYADSVKGRFTISQDNAKNTVYLQMTSLKPEDTAIYSCRTMASRIGCWGQGTLVTVS

SEQ ID NO: 552 - protein, 114 aa, synthetic construct
EVQLVESGGGSVQAGETLRLSCTAPGFTFDDSDMGWYRQAPGDECELVSTISSDGSTNYADSVKGRFTISQDNAKNTVYLQMTSLKPEDTAIYSCRTMASRIGCWGQGTLVTVS

SEQ ID NO: 553 - protein, 114 aa, synthetic construct
EVQLVESGGGSVQAGETLRLSCTASCFTFDDSDMGWYRQAPGDECELVSTISSDGSTNYADSVKGRFTISQDNAKNTVYLQMTSLKPEDTAIYSCRTMASRIGCWGQGTLVTVS

SEQ ID NO: 554 - protein, 114 aa, synthetic construct
EVQLVESGGGSVQAGETLRLSCTASDFTFDDSDMGWYRQAPGDECELVSTISSDGSTNYADSVKGRFTISQDNAKNTVYLQMTSLKPEDTAIYSCRTMASRIGCWGQGTLVTVS

SEQ ID NO: 555 - protein, 114 aa, synthetic construct
EVQLVESGGGSVQAGETLRLSCTASGCTFDDSDMGWYRQAPGDECELVSTISSDGSTNYADSVKGRFTISQDNAKNTVYLQMTSLKPEDTAIYSCRTMASRIGCWGQGTLVTVS

SEQ ID NO: 556 - protein, 114 aa, synthetic construct
EVQLVESGGGSVQAGETLRLSCTASGFAFDDSDMGWYRQAPGDECELVSTISSDGSTNYADSVKGRFTISQDNAKNTVYLQMTSLKPEDTAIYSCRTMASRIGCWGQGTLVTVS

SEQ ID NO: 557 - protein, 114 aa, synthetic construct
EVQLVESGGGSVQAGETLRLSCTASGFIFDDSDMGWYRQAPGDECELVSTISSDGSTNYADSVKGRFTISQDNAKNTVYLQMTSLKPEDTAIYSCRTMASRIGCWGQGTLVTVS

SEQ ID NO: 558 - protein, 114 aa, synthetic construct
EVQLVESGGGSVQAGETLRLSCTASGFSFDDSDMGWYRQAPGDECELVSTISSDGSTNYADSVKGRFTISQDNAKNTVYLQMTSLKPEDTAIYSCRTMASRIGCWGQGTLVTVS

SEQ ID NO: 559 - protein, 114 aa, synthetic construct
EVQLVESGGGSVQAGETLRLSCTASGFTCDDSDMGWYRQAPGDECELVSTISSDGSTNYADSVKGRFTISQDNAKNTVYLQMTSLKPEDTAIYSCRTMASRIGCWGQGTLVTVS

SEQ ID NO: 560 - protein, 114 aa, synthetic construct
EVQLVESGGGSVQAGETLRLSCTASGFTFADSDMGWYRQAPGDECELVSTISSDGSTNYADSVKGRFTISQDNAKNTVYLQMTSLKPEDTAIYSCRTMASRIGCWGQGTLVTVS

SEQ ID NO: 561 - protein, 114 aa, synthetic construct
EVQLVESGGGSVQAGETLRLSCTASGFTFDDLDMGWYRQAPGDECELVSTISSDGSTNYADSVKGRFTISQDNAKNTVYLQMTSLKPEDTAIYSCRTMASRIGCWGQGTLVTVS

SEQ ID NO: 562 - protein, 114 aa, synthetic construct
EVQLVESGGGSVQAGETLRLSCTASGFTFDDPDMGWYRQAPGDECELVSTISSDGSTNYADSVKGRFTISQDNAKNTVYLQMTSLKPEDTAIYSCRTMASRIGCWGQGTLVTVS

SEQ ID NO: 563 - protein, 114 aa, synthetic construct
EVQLVESGGGSVQAGETLRLSCTASGFTFDDSAMGWYRQAPGDECELVSTISSDGSTNYADSVKGRFTISQDNAKNTVYLQMTSLKPEDTAIYSCRTMASRIGCWGQGTLVTVS

SEQ ID NO: 564 - protein, 114 aa, synthetic construct
EVQLVESGGGSVQAGETLRLSCTASGFTFDDSDIGWYRQAPGDECELVSTISSDGSTNYADSVKGRFTISQDNAKNTVYLQMTSLKPEDTAIYSCRTMASRIGCWGQGTLVTVS

SEQ ID NO: 565 - protein, 114 aa, synthetic construct
EVQLVESGGGSVQAGETLRLSCTASGFTFDDSDKGWYRQAPGDECELVSTISSDGSTNYADSVKGRFTISQDNAKNTVYLQMTSLKPEDTAIYSCRTMASRIGCWGQGTLVTVS

SEQ ID NO: 566 - protein, 114 aa, synthetic construct
EVQLVESGGGSVQAGETLRLSCTASGFTFDDSDMCWYRQAPGDECELVSTISSDGSTNYADSVKGRFTISQDNAKNTVYLQMTSLKPEDTAIYSCRTMASRIGCWGQGTLVTVS

SEQ ID NO: 567 - protein, 114 aa, synthetic construct
EVQLVESGGGSVQAGETLRLSCTASGFTFDDSDMDWYRQAPGDECELVSTISSDGSTNYADSVKGRFTISQDNAKNTVYLQMTSLKPEDTAIYSCRTMASRIGCWGQGTLVTVS

SEQ ID NO: 568 - protein, 114 aa, synthetic construct
EVQLVESGGGSVQAGETLRLSCTASGFTFDDSDMGCYRQAPGDECELVSTISSDGSTNYADSVKGRFTISQDNAKNTVYLQMTSLKPEDTAIYSCRTMASRIGCWGQGTLVTVS

SEQ ID NO: 569 - protein, 114 aa, synthetic construct
EVQLVESGGGSVQAGETLRLSCTASGFTFDDSDMGLYRQAPGDECELVSTISSDGSTNYADSVKGRFTISQDNAKNTVYLQMTSLKPEDTAIYSCRTMASRIGCWGQGTLVTVS

SEQ ID NO: 570 - protein, 114 aa, synthetic construct
EVQLVESGGGSVQAGETLRLSCTASGFTFDDSDMGRYRQAPGDECELVSTISSDGSTNYADSVKGRFTISQDNAKNTVYLQMTSLKPEDTAIYSCRTMASRIGCWGQGTLVTVS

SEQ ID NO: 571 - protein, 114 aa, synthetic construct
EVQLVESGGGSVQAGETLRLSCTASGFTFDDSDMGWCRQAPGDECELVSTISSDGSTNYADSVKGRFTISQDNAKNTVYLQMTSLKPEDTAIYSCRTMASRIGCWGQGTLVTVS

SEQ ID NO: 572 - protein, 114 aa, synthetic construct
EVQLVESGGGSVQAGETLRLSCTASGFTFDDSDMGWDRQAPGDECELVSTISSDGSTNYADSVKGRFTISQDNAKNTVYLQMTSLKPEDTAIYSCRTMASRIGCWGQGTLVTVS

SEQ ID NO: 573 - protein, 114 aa, synthetic construct
EVQLVESGGGSVQAGETLRLSCTASGFTFDDSDMGWFRQAPGDECELVSTISSDGSTNYADSVKGRFTISQDNAKNTVYLQMTSLKPEDTAIYSCRTMASRIGCWGQGTLVTVS

SEQ ID NO: 574 - protein, 114 aa, synthetic construct
EVQLVESGGGSVQAGETLRLSCTASGFTFDDSDMGWHRQAPGDECELVSTISSDGSTNYADSVKGRFTISQDNAKNTVYLQMTSLKPEDTAIYSCRTMASRIGCWGQGTLVTVS

SEQ ID NO: 575 - protein, 114 aa, synthetic construct
EVQLVESGGGSVQAGETLRLSCTASGFTFDDSDMGWNRQAPGDECELVSTISSDGSTNYADSVKGRFTISQDNAKNTVYLQMTSLKPEDTAIYSCRTMASRIGCWGQGTLVTVS

SEQ ID NO: 576 - protein, 114 aa, synthetic construct
EVQLVESGGGSVQAGETLRLSCTASGFTFDDSDMGWSRQAPGDECELVSTISSDGSTNYADSVKGRFTISQDNAKNTVYLQMTSLKPEDTAIYSCRTMASRIGCWGQGTLVTVS

SEQ ID NO: 577 - protein, 114 aa, synthetic construct
EVQLVESGGGSVQAGETLRLSCTASGFTFDDSDMGWYGQAPGDECELVSTISSDGSTNYADSVKGRFTISQDNAKNTVYLQMTSLKPEDTAIYSCRTMASRIGCWGQGTLVTVS

SEQ ID NO: 578 - protein, 114 aa, synthetic construct
EVQLVESGGGSVQAGETLRLSCTASGFTFDDSDMGWYKQAPGDECELVSTISSDGSTNYADSVKGRFTISQDNAKNTVYLQMTSLKPEDTAIYSCRTMASRIGCWGQGTLVTVS

SEQ ID NO: 579 - protein, 114 aa, synthetic construct
EVQLVESGGGSVQAGETLRLSCTASGFTFDDSDMGWYRHAPGDECELVSTISSDGSTNYADSVKGRFTISQDNAKNTVYLQMTSLKPEDTAIYSCRTMASRIGCWGQGTLVTVS

SEQ ID NO: 580 - protein, 114 aa, synthetic construct
EVQLVESGGGSVQAGETLRLSCTASGFTFDDSDMGWYRKAPGDECELVSTISSDGSTNYADSVKGRFTISQDNAKNTVYLQMTSLKPEDTAIYSCRTMASRIGCWGQGTLVTVS

SEQ ID NO: 581 - protein, 114 aa, synthetic construct
EVQLVESGGGSVQAGETLRLSCTASGFTFDDSDMGWYRLAPGDECELVSTISSDGSTNYADSVKGRFTISQDNAKNTVYLQMTSLKPEDTAIYSCRTMASRIGCWGQGTLVTVS

SEQ ID NO: 582 - protein, 114 aa, synthetic construct
EVQLVESGGGSVQAGETLRLSCTASGFTFDDSDMGWYRQALGDECELVSTISSDGSTNYADSVKGRFTISQDNAKNTVYLQMTSLKPEDTAIYSCRTMASRIGCWGQGTLVTVS

SEQ ID NO: 583 - protein, 114 aa, synthetic construct
EVQLVESGGGSVQAGETLRLSCTASGFTFDDSDMGWYRQAPDDECELVSTISSDGSTNYADSVKGRFTISQDNAKNTVYLQMTSLKPEDTAIYSCRTMASRIGCWGQGTLVTVS

SEQ ID NO: 584 - protein, 114 aa, synthetic construct
EVQLVESGGGSVQAGETLRLSCTASGFTFDDSDMGWYRQAPGDDCELVSTISSDGSTNYADSVKGRFTISQDNAKNTVYLQMTSLKPEDTAIYSCRTMASRIGCWGQGTLVTVS

SEQ ID NO: 585 - protein, 114 aa, synthetic construct
EVQLVESGGGSVQAGETLRLSCTASGFTFDDSDMGWYRQAPGDECDLVSTISSDGSTNYADSVKGRFTISQDNAKNTVYLQMTSLKPEDTAIYSCRTMASRIGCWGQGTLVTVS

SEQ ID NO: 586 - protein, 114 aa, synthetic construct
EVQLVESGGGSVQAGETLRLSCTASGFTFDDSDMGWYRQAPGDECELASTISSDGSTNYADSVKGRFTISQDNAKNTVYLQMTSLKPEDTAIYSCRTMASRIGCWGQGTLVTVS

SEQ ID NO: 587 - protein, 114 aa, synthetic construct
EVQLVESGGGSVQAGETLRLSCTASGFTFDDSDMGWYRQAPGDECELESTISSDGSTNYADSVKGRFTISQDNAKNTVYLQMTSLKPEDTAIYSCRTMASRIGCWGQGTLVTVS

SEQ ID NO: 588 - protein, 114 aa, synthetic construct
EVQLVESGGGSVQAGETLRLSCTASGFTFDDSDMGWYRQAPGDECELISTISSDGSTNYADSVKGRFTISQDNAKNTVYLQMTSLKPEDTAIYSCRTMASRIGCWGQGTLVTVS

SEQ ID NO: 589 - protein, 114 aa, synthetic construct
EVQLVESGGGSVQAGETLRLSCTASGFTFDDSDMGWYRQAPGDECELLSTISSDGSTNYADSVKGRFTISQDNAKNTVYLQMTSLKPEDTAIYSCRTMASRIGCWGQGTLVTVS

SEQ ID NO: 590 - protein, 114 aa, synthetic construct
EVQLVESGGGSVQAGETLRLSCTASGFTFDDSDMGWYRQAPGDECELVFTISSDGSTNYADSVKGRFTISQDNAKNTVYLQMTSLKPEDTAIYSCRTMASRIGCWGQGTLVTVS

SEQ ID NO: 591 - protein, 114 aa, synthetic construct
EVQLVESGGGSVQAGETLRLSCTASGFTFDDSDMGWYRQAPGDECELVPTISSDGSTNYADSVKGRFTISQDNAKNTVYLQMTSLKPEDTAIYSCRTMASRIGCWGQGTLVTVS

SEQ ID NO: 592 - protein, 114 aa, synthetic construct
EVQLVESGGGSVQAGETLRLSCTASGFTFDDSDMGWYRQAPGDECELVSAISSDGSTNYADSVKGRFTISQDNAKNTVYLQMTSLKPEDTAIYSCRTMASRIGCWGQGTLVTVS

SEQ ID NO: 593 - protein, 114 aa, synthetic construct
EVQLVESGGGSVQAGETLRLSCTASGFTFDDSDMGWYRQAPGDECELVSIISSDGSTNYADSVKGRFTISQDNAKNTVYLQMTSLKPEDTAIYSCRTMASRIGCWGQGTLVTVS

SEQ ID NO: 594 - protein, 114 aa, synthetic construct
EVQLVESGGGSVQAGETLRLSCTASGFTFDDSDMGWYRQAPGDECELVSSISSDGSTNYADSVKGRFTISQDNAKNTVYLQMTSLKPEDTAIYSCRTMASRIGCWGQGTLVTVS

SEQ ID NO: 595 - protein, 114 aa, synthetic construct
EVQLVESGGGSVQAGETLRLSCTASGFTFDDSDMGWYRQAPGDECELVSTIFSDGSTNYADSVKGRFTISQDNAKNTVYLQMTSLKPEDTAIYSCRTMASRIGCWGQGTLVTVS

SEQ ID NO: 596 - protein, 114 aa, synthetic construct
EVQLVESGGGSVQAGETLRLSCTASGFTFDDSDMGWYRQAPGDECELVSTIPSDGSTNYADSVKGRFTISQDNAKNTVYLQMTSLKPEDTAIYSCRTMASRIGCWGQGTLVTVS

SEQ ID NO: 597 - protein, 114 aa, synthetic construct
EVQLVESGGGSVQAGETLRLSCTASGFTFDDSDMGWYRQAPGDECELVSTISGDGSTNYADSVKGRFTISQDNAKNTVYLQMTSLKPEDTAIYSCRTMASRIGCWGQGTLVTVS

SEQ ID NO: 598 - protein, 114 aa, synthetic construct
EVQLVESGGGSVQAGETLRLSCTASGFTFDDSDMGWYRQAPGDECELVSTISIDGSTNYADSVKGRFTISQDNAKNTVYLQMTSLKPEDTAIYSCRTMASRIGCWGQGTLVTVS

SEQ ID NO: 599 - protein, 114 aa, synthetic construct
EVQLVESGGGSVQAGETLRLSCTASGFTFDDSDMGWYRQAPGDECELVSTISRDGSTNYADSVKGRFTISQDNAKNTVYLQMTSLKPEDTAIYSCRTMASRIGCWGQGTLVTVS

SEQ ID NO: 600 - protein, 114 aa, synthetic construct
EVQLVESGGGSVQAGETLRLSCTASGFTFDDSDMGWYRQAPGDECELVSTISSDDSTNYADSVKGRFTISQDNAKNTVYLQMTSLKPEDTAIYSCRTMASRIGCWGQGTLVTVS

SEQ ID NO: 601 - protein, 114 aa, synthetic construct
EVQLVESGGGSVQAGETLRLSCTASGFTFDDSDMGWYRQAPGDECELVSTISSDGGTNYADSVKGRFTISQDNAKNTVYLQMTSLKPEDTAIYSCRTMASRIGCWGQGTLVTVS

SEQ ID NO: 602 - protein, 114 aa, synthetic construct
EVQLVESGGGSVQAGETLRLSCTASGFTFDDSDMGWYRQAPGDECELVSTISSDGITNYADSVKGRFTISQDNAKNTVYLQMTSLKPEDTAIYSCRTMASRIGCWGQGTLVTVS

SEQ ID NO: 603 - protein, 114 aa, synthetic construct
EVQLVESGGGSVQAGETLRLSCTASGFTFDDSDMGWYRQAPGDECELVSTISSDGNTNYADSVKGRFTISQDNAKNTVYLQMTSLKPEDTAIYSCRTMASRIGCWGQGTLVTVS

SEQ ID NO: 604 - protein, 114 aa, synthetic construct
EVQLVESGGGSVQAGETLRLSCTASGFTFDDSDMGWYRQAPGDECELVSTISSDGSANYADSVKGRFTISQDNAKNTVYLQMTSLKPEDTAIYSCRTMASRIGCWGQGTLVTVS

SEQ ID NO: 605 - protein, 114 aa, synthetic construct
EVQLVESGGGSVQAGETLRLSCTASGFTFDDSDMGWYRQAPGDECELVSTISSDGSINYADSVKGRFTISQDNAKNTVYLQMTSLKPEDTAIYSCRTMASRIGCWGQGTLVTVS

SEQ ID NO: 606 - protein, 114 aa, synthetic construct
EVQLVESGGGSVQAGETLRLSCTASGFTFDDSDMGWYRQAPGDECELVSTISSDGSSNYADSVKGRFTISQDNAKNTVYLQMTSLKPEDTAIYSCRTMASRIGCWGQGTLVTVS

SEQ ID NO: 607 - protein, 114 aa, synthetic construct
EVQLVESGGGSVQAGETLRLSCTASGFTFDDSDMGWYRQAPGDECELVSTISSDGSTDYADSVKGRFTISQDNAKNTVYLQMTSLKPEDTAIYSCRTMASRIGCWGQGTLVTVS

SEQ ID NO: 608 - protein, 114 aa, synthetic construct
EVQLVESGGGSVQAGETLRLSCTASGFTFDDSDMGWYRQAPGDECELVSTISSDGSTKYADSVKGRFTISQDNAKNTVYLQMTSLKPEDTAIYSCRTMASRIGCWGQGTLVTVS

SEQ ID NO: 609 - protein, 114 aa, synthetic construct
EVQLVESGGGSVQAGETLRLSCTASGFTFDDSDMGWYRQAPGDECELVSTISSDGSTNCADSVKGRFTISQDNAKNTVYLQMTSLKPEDTAIYSCRTMASRIGCWGQGTLVTVS

SEQ ID NO: 610 - protein, 114 aa, synthetic construct
EVQLVESGGGSVQAGETLRLSCTASGFTFDDSDMGWYRQAPGDECELVSTISSDGSTNFADSVKGRFTISQDNAKNTVYLQMTSLKPEDTAIYSCRTMASRIGCWGQGTLVTVS

SEQ ID NO: 611 - protein, 114 aa, synthetic construct
EVQLVESGGGSVQAGETLRLSCTASGFTFDDSDMGWYRQAPGDECELVSTISSDGSTNHADSVKGRFTISQDNAKNTVYLQMTSLKPEDTAIYSCRTMASRIGCWGQGTLVTVS

SEQ ID NO: 612 - protein, 114 aa, synthetic construct
EVQLVESGGGSVQAGETLRLSCTASGFTFDDSDMGWYRQAPGDECELVSTISSDGSTNYADFVKGRFTISQDNAKNTVYLQMTSLKPEDTAIYSCRTMASRIGCWGQGTLVTVS

SEQ ID NO: 613 - protein, 114 aa, synthetic construct
EVQLVESGGGSVQAGETLRLSCTASGFTFDDSDMGWYRQAPGDECELVSTISSDGSTNYADPVKGRFTISQDNAKNTVYLQMTSLKPEDTAIYSCRTMASRIGCWGQGTLVTVS

SEQ ID NO: 614 - protein, 114 aa, synthetic construct
EVQLVESGGGSVQAGETLRLSCTASGFTFDDSDMGWYRQAPGDECELVSTISSDGSTNYADSDKGRFTISQDNAKNTVYLQMTSLKPEDTAIYSCRTMASRIGCWGQGTLVTVS

SEQ ID NO: 615 - protein, 114 aa, synthetic construct
EVQLVESGGGSVQAGETLRLSCTASGFTFDDSDMGWYRQAPGDECELVSTISSDGSTNYADSFKGRFTISQDNAKNTVYLQMTSLKPEDTAIYSCRTMASRIGCWGQGTLVTVS

SEQ ID NO: 616 - protein, 114 aa, synthetic construct
EVQLVESGGGSVQAGETLRLSCTASGFTFDDSDMGWYRQAPGDECELVSTISSDGSTNYADSGKGRFTISQDNAKNTVYLQMTSLKPEDTAIYSCRTMASRIGCWGQGTLVTVS

SEQ ID NO: 617 - protein, 114 aa, synthetic construct
EVQLVESGGGSVQAGETLRLSCTASGFTFDDSDMGWYRQAPGDECELVSTISSDGSTNYADSIKGRFTISQDNAKNTVYLQMTSLKPEDTAIYSCRTMASRIGCWGQGTLVTVS

SEQ ID NO: 618 - protein, 114 aa, synthetic construct
EVQLVESGGGSVQAGETLRLSCTASGFTFDDSDMGWYRQAPGDECELVSTISSDGSTNYADSVEGRFTISQDNAKNTVYLQMTSLKPEDTAIYSCRTMASRIGCWGQGTLVTVS

SEQ ID NO: 619 - protein, 114 aa, synthetic construct
EVQLVESGGGSVQAGETLRLSCTASGFTFDDSDMGWYRQAPGDECELVSTISSDGSTNYADSVIGRFTISQDNAKNTVYLQMTSLKPEDTAIYSCRTMASRIGCWGQGTLVTVS

SEQ ID NO: 620 - protein, 114 aa, synthetic construct
EVQLVESGGGSVQAGETLRLSCTASGFTFDDSDMGWYRQAPGDECELVSTISSDGSTNYADSVKERFTISQDNAKNTVYLQMTSLKPEDTAIYSCRTMASRIGCWGQGTLVTVS

SEQ ID NO: 621 - protein, 114 aa, synthetic construct
EVQLVESGGGSVQAGETLRLSCTASGFTFDDSDMGWYRQAPGDECELVSTISSDGSTNYADSVKGLFTISQDNAKNTVYLQMTSLKPEDTAIYSCRTMASRIGCWGQGTLVTVS

SEQ ID NO: 622 - protein, 114 aa, synthetic construct
EVQLVESGGGSVQAGETLRLSCTASGFTFDDSDMGWYRQAPGDECELVSTISSDGSTNYADSVKGQFTISQDNAKNTVYLQMTSLKPEDTAIYSCRTMASRIGCWGQGTLVTVS

SEQ ID NO: 623 - protein, 114 aa, synthetic construct
EVQLVESGGGSVQAGETLRLSCTASGFTFDDSDMGWYRQAPGDECELVSTISSDGSTNYADSVKGRCTISQDNAKNTVYLQMTSLKPEDTAIYSCRTMASRIGCWGQGTLVTVS

SEQ ID NO: 624 - protein, 114 aa, synthetic construct
EVQLVESGGGSVQAGETLRLSCTASGFTFDDSDMGWYRQAPGDECELVSTISSDGSTNYADSVKGRFAISQDNAKNTVYLQMTSLKPEDTAIYSCRTMASRIGCWGQGTLVTVS

SEQ ID NO: 625 - protein, 114 aa, synthetic construct
EVQLVESGGGSVQAGETLRLSCTASGFTFDDSDMGWYRQAPGDECELVSTISSDGSTNYADSVKGRFIISQDNAKNTVYLQMTSLKPEDTAIYSCRTMASRIGCWGQGTLVTVS

SEQ ID NO: 626 - protein, 114 aa, synthetic construct
EVQLVESGGGSVQAGETLRLSCTASGFTFDDSDMGWYRQAPGDECELVSTISSDGSTNYADSVKGRFNISQDNAKNTVYLQMTSLKPEDTAIYSCRTMASRIGCWGQGTLVTVS

SEQ ID NO: 627 - protein, 114 aa, synthetic construct
EVQLVESGGGSVQAGETLRLSCTASGFTFDDSDMGWYRQAPGDECELVSTISSDGSTNYADSVKGRFSISQDNAKNTVYLQMTSLKPEDTAIYSCRTMASRIGCWGQGTLVTVS

SEQ ID NO: 628 - protein, 114 aa, synthetic construct
EVQLVESGGGSVQAGETLRLSCTASGFTFDDSDMGWYRQAPGDECELVSTISSDGSTNYADSVKGRFTFSQDNAKNTVYLQMTSLKPEDTAIYSCRTMASRIGCWGQGTLVTVS

SEQ ID NO: 629 - protein, 114 aa, synthetic construct
EVQLVESGGGSVQAGETLRLSCTASGFTFDDSDMGWYRQAPGDECELVSTISSDGSTNYADSVKGRFTIFQDNAKNTVYLQMTSLKPEDTAIYSCRTMASRIGCWGQGTLVTVS

SEQ ID NO: 630 - protein, 114 aa, synthetic construct
EVQLVESGGGSVQAGETLRLSCTASGFTFDDSDMGWYRQAPGDECELVSTISSDGSTNYADSVKGRFTIPQDNAKNTVYLQMTSLKPEDTAIYSCRTMASRIGCWGQGTLVTVS

SEQ ID NO: 631 - protein, 114 aa, synthetic construct
EVQLVESGGGSVQAGETLRLSCTASGFTFDDSDMGWYRQAPGDECELVSTISSDGSTNYADSVKGRFTISQDDAKNTVYLQMTSLKPEDTAIYSCRTMASRIGCWGQGTLVTVS

SEQ ID NO: 632 - protein, 114 aa, synthetic construct
EVQLVESGGGSVQAGETLRLSCTASGFTFDDSDMGWYRQAPGDECELVSTISSDGSTNYADSVKGRFTISQDHAKNTVYLQMTSLKPEDTAIYSCRTMASRIGCWGQGTLVTVS

SEQ ID NO: 633 - protein, 114 aa, synthetic construct
EVQLVESGGGSVQAGETLRLSCTASGFTFDDSDMGWYRQAPGDECELVSTISSDGSTNYADSVKGRFTISQDIAKNTVYLQMTSLKPEDTAIYSCRTMASRIGCWGQGTLVTVS

SEQ ID NO: 634 - protein, 114 aa, synthetic construct
EVQLVESGGGSVQAGETLRLSCTASGFTFDDSDMGWYRQAPGDECELVSTISSDGSTNYADSVKGRFTISQDNAENTVYLQMTSLKPEDTAIYSCRTMASRIGCWGQGTLVTVS

SEQ ID NO: 635 - protein, 114 aa, synthetic construct
EVQLVESGGGSVQAGETLRLSCTASGFTFDDSDMGWYRQAPGDECELVSTISSDGSTNYADSVKGRFTISQDNAKDTVYLQMTSLKPEDTAIYSCRTMASRIGCWGQGTLVTVS

SEQ ID NO: 636 - protein, 114 aa, synthetic construct
EVQLVESGGGSVQAGETLRLSCTASGFTFDDSDMGWYRQAPGDECELVSTISSDGSTNYADSVKGRFTISQDNAKNAVYLQMTSLKPEDTAIYSCRTMASRIGCWGQGTLVTVS

SEQ ID NO: 637 - protein, 114 aa, synthetic construct
EVQLVESGGGSVQAGETLRLSCTASGFTFDDSDMGWYRQAPGDECELVSTISSDGSTNYADSVKGRFTISQDNAKNIVYLQMTSLKPEDTAIYSCRTMASRIGCWGQGTLVTVS

SEQ ID NO: 638 - protein, 114 aa, synthetic construct
EVQLVESGGGSVQAGETLRLSCTASGFTFDDSDMGWYRQAPGDECELVSTISSDGSTNYADSVKGRFTISQDNAKNPVYLQMTSLKPEDTAIYSCRTMASRIGCWGQGTLVTVS

SEQ ID NO: 639 - protein, 114 aa, synthetic construct
EVQLVESGGGSVQAGETLRLSCTASGFTFDDSDMGWYRQAPGDECELVSTISSDGSTNYADSVKGRFTISQDNAKNSVYLQMTSLKPEDTAIYSCRTMASRIGCWGQGTLVTVS

SEQ ID NO: 640 - protein, 114 aa, synthetic construct
EVQLVESGGGSVQAGETLRLSCTASGFTFDDSDMGWYRQAPGDECELVSTISSDGSTNYADSVKGRFTISQDNAKNTAYLQMTSLKPEDTAIYSCRTMASRIGCWGQGTLVTVS

SEQ ID NO: 641 - protein, 114 aa, synthetic construct
EVQLVESGGGSVQAGETLRLSCTASGFTFDDSDMGWYRQAPGDECELVSTISSDGSTNYADSVKGRFTISQDNAKNTEYLQMTSLKPEDTAIYSCRTMASRIGCWGQGTLVTVS

SEQ ID NO: 642 - protein, 114 aa, synthetic construct
EVQLVESGGGSVQAGETLRLSCTASGFTFDDSDMGWYRQAPGDECELVSTISSDGSTNYADSVKGRFTISQDNAKNTMYLQMTSLKPEDTAIYSCRTMASRIGCWGQGTLVTVS

SEQ ID NO: 643 - protein, 114 aa, synthetic construct
EVQLVESGGGSVQAGETLRLSCTASGFTFDDSDMGWYRQAPGDECELVSTISSDGSTNYADSVKGRFTISQDNAKNTVCLQMTSLKPEDTAIYSCRTMASRIGCWGQGTLVTVS

SEQ ID NO: 644 - protein, 114 aa, synthetic construct
EVQLVESGGGSVQAGETLRLSCTASGFTFDDSDMGWYRQAPGDECELVSTISSDGSTNYADSVKGRFTISQDNAKNTVFLQMTSLKPEDTAIYSCRTMASRIGCWGQGTLVTVS

SEQ ID NO: 645 - protein, 114 aa, synthetic construct
EVQLVESGGGSVQAGETLRLSCTASGFTFDDSDMGWYRQAPGDECELVSTISSDGSTNYADSVKGRFTISQDNAKNTVHLQMTSLKPEDTAIYSCRTMASRIGCWGQGTLVTVS

SEQ ID NO: 646 - protein, 114 aa, synthetic construct
EVQLVESGGGSVQAGETLRLSCTASGFTFDDSDMGWYRQAPGDECELVSTISSDGSTNYADSVKGRFTISQDNAKNTVSLQMTSLKPEDTAIYSCRTMASRIGCWGQGTLVTVS

SEQ ID NO: 647 - protein, 106 aa, synthetic construct
EVQLVESGGGSVQAGETLRLSCTASGFTFDDSDMGWYRQAPGDECELVSTISSDGSTNYADSVKGRFTISQDNAKNTVYFCAASPRQLGPYYAMDYWGQGTSVTVS

SEQ ID NO: 648 - protein, 114 aa, synthetic construct
EVQLVESGGGSVQAGETLRLSCTASGFTFDDSDMGWYRQAPGDECELVSTISSDGSTNYADSVKGRFTISQDNAKNTVYLEMTSLKPEDTAIYSCRTMASRIGCWGQGTLVTVS

SEQ ID NO: 649 - protein, 114 aa, synthetic construct
EVQLVESGGGSVQAGETLRLSCTASGFTFDDSDMGWYRQAPGDECELVSTISSDGSTNYADSVKGRFTISQDNAKNTVYLHMTSLKPEDTAIYSCRTMASRIGCWGPGTLVTVS

SEQ ID NO: 650 - protein, 114 aa, synthetic construct
EVQLVESGGGSVQAGETLRLSCTASGFTFDDSDMGWYRQAPGDECELVSTISSDGSTNYADSVKGRFTISQDNAKNTVYLHMTSLKPEDTAIYSCRTMASRIGCWGQGTLVTVS

SEQ ID NO: 651 - protein, 114 aa, synthetic construct
EVQLVESGGGSVQAGETLRLSCTASGFTFDDSDMGWYRQAPGDECELVSTISSDGSTNYADSVKGRFTISQDNAKNTVYLKMTSLKPEDTAIYSCRTMASRIGCWGQGTLVTVS

SEQ ID NO: 652 - protein, 114 aa, synthetic construct
EVQLVESGGGSVQAGETLRLSCTASGFTFDDSDMGWYRQAPGDECELVSTISSDGSTNYADSVKGRFTISQDNAKNTVYLLMTSLKPEDTAIYSCRTMASRIGCWGQGTLVTVS

SEQ ID NO: 653 - protein, 114 aa, synthetic construct
EVQLVESGGGSVQAGETLRLSCTASGFTFDDSDMGWYRQAPGDECELVSTISSDGSTNYADSVKGRFTISQDNAKNTVYLPMTSLKPEDTAIYSCRTMASRIGCWGQGTLVTVS

SEQ ID NO: 654 - protein, 114 aa, synthetic construct
EVQLVESGGGSVQAGETLRLSCTASGFTFDDSDMGWYRQAPGDECELVSTISSDGSTNYADSVKGRFTISQDNAKNTVYLQITSLKPEDTAIYSCRTMASRIGCWGQGTLVTVS

SEQ ID NO: 655 - protein, 114 aa, synthetic construct
EVQLVESGGGSVQAGETLRLSCTASGFTFDDSDMGWYRQAPGDECELVSTISSDGSTNYADSVKGRFTISQDNAKNTVYLQMASLKPEDTAIYSCRTMASRIGCWGQGTLVTVS

SEQ ID NO: 656 - protein, 114 aa, synthetic construct
EVQLVESGGGSVQAGETLRLSCTASGFTFDDSDMGWYRQAPGDECELVSTISSDGSTNYADSVKGRFTISQDNAKNTVYLQMISLKPEDTAIYSCRTMASRIGCWGQGTLVTVS

SEQ ID NO: 657 - protein, 114 aa, synthetic construct
EVQLVESGGGSVQAGETLRLSCTASGFTFDDSDMGWYRQAPGDECELVSTISSDGSTNYADSVKGRFTISQDNAKNTVYLQMNSLKPEDTAIYSCRTMASRIGCWGQGTLVTVS

SEQ ID NO: 658 - protein, 115 aa, synthetic construct
EVQLVESGGGSVQAGETLRLSCTASGFTFDDSDMGWYRQAPGDECELVSTISSDGSTNYADSVKGRFTISQDNAKNTVYLQMNSLKPEDTAVYYCAGVGDYGRRAMGQGTSVTVS

SEQ ID NO: 659 - protein, 114 aa, synthetic construct
EVQLVESGGGSVQAGETLRLSCTASGFTFDDSDMGWYRQAPGDECELVSTISSDGSTNYADSVKGRFTISQDNAKNTVYLQMPSLKPEDTAIYSCRTMASRIGCWGQGTLVTVS

SEQ ID NO: 660 - protein, 114 aa, synthetic construct
EVQLVESGGGSVQAGETLRLSCTASGFTFDDSDMGWYRQAPGDECELVSTISSDGSTNYADSVKGRFTISQDNAKNTVYLQMSSLKPEDTAIYSCRTMASRIGCWGQGTLVTVS

SEQ ID NO: 661 - protein, 114 aa, synthetic construct
EVQLVESGGGSVQAGETLRLSCTASGFTFDDSDMGWYRQAPGDECELVSTISSDGSTNYADSVKGRFTISQDNAKNTVYLQMTLLKPEDTAIYSCRTMASRIGCWGQGTLVTVS

SEQ ID NO: 662 - protein, 114 aa, synthetic construct
EVQLVESGGGSVQAGETLRLSCTASGFTFDDSDMGWYRQAPGDECELVSTISSDGSTNYADSVKGRFTISQDNAKNTVYLQMTPLKPEDTAIYSCRTMASRIGCWGQGTLVTVS

SEQ ID NO: 663 - protein, 114 aa, synthetic construct
EVQLVESGGGSVQAGETLRLSCTASGFTFDDSDMGWYRQAPGDECELVSTISSDGSTNYADSVKGRFTISQDNAKNTVYLQMTSFKPEDTAIYSCRTMASRIGCWGQGTLVTVS

SEQ ID NO: 664 - protein, 114 aa, synthetic construct
EVQLVESGGGSVQAGETLRLSCTASGFTFDDSDMGWYRQAPGDECELVSTISSDGSTNYADSVKGRFTISQDNAKNTVYLQMTSLEPEDTAIYSCRTMASRIGCWGQGTLVTVS

SEQ ID NO: 665 - protein, 114 aa, synthetic construct
EVQLVESGGGSVQAGETLRLSCTASGFTFDDSDMGWYRQAPGDECELVSTISSDGSTNYADSVKGRFTISQDNAKNTVYLQMTSLKLEDTAIYSCRTMASRIGCWGQGTLVTVS

SEQ ID NO: 666 - protein, 114 aa, synthetic construct
EVQLVESGGGSVQAGETLRLSCTASGFTFDDSDMGWYRQAPGDECELVSTISSDGSTNYADSVKGRFTISQDNAKNTVYLQMTSLKPDDTAIYSCRTMASRIGCWGQGTLVTVS

SEQ ID NO: 667 - protein, 114 aa, synthetic construct
EVQLVESGGGSVQAGETLRLSCTASGFTFDDSDMGWYRQAPGDECELVSTISSDGSTNYADSVKGRFTISQDNAKNTVYLQMTSLKPEDAAIYSCRTMASRIGCWGQGTLVTVS

SEQ ID NO: 668 - protein, 114 aa, synthetic construct
EVQLVESGGGSVQAGETLRLSCTASGFTFDDSDMGWYRQAPGDECELVSTISSDGSTNYADSVKGRFTISQDNAKNTVYLQMTSLKPEDIAIYSCRTMASRIGCWGQGTLVTVS

SEQ ID NO: 669 - protein, 114 aa, synthetic construct
EVQLVESGGGSVQAGETLRLSCTASGFTFDDSDMGWYRQAPGDECELVSTISSDGSTNYADSVKGRFTISQDNAKNTVYLQMTSLKPEDSAIYSCRTMASRIGCWGQGTLVTVS

SEQ ID NO: 670 - protein, 114 aa, synthetic construct
EVQLVESGGGSVQAGETLRLSCTASGFTFDDSDMGWYRQAPGDECELVSTISSDGSTNYADSVKGRFTISQDNAKNTVYLQMTSLKPEDTAICSCRTMASRIGCWGQGTLVTVS

SEQ ID NO: 671 - protein, 114 aa, synthetic construct
EVQLVESGGGSVQAGETLRLSCTASGFTFDDSDMGWYRQAPGDECELVSTISSDGSTNYADSVKGRFTISQDNAKNTVYLQMTSLKPEDTAIHSCRTMASRIGCWGQGTLVTVS

SEQ ID NO: 672 - protein, 114 aa, synthetic construct
EVQLVESGGGSVQAGETLRLSCTASGFTFDDSDMGWYRQAPGDECELVSTISSDGSTNYADSVKGRFTISQDNAKNTVYLQMTSLKPEDTAISSCRTMASRIGCWGQGTLVTVS

SEQ ID NO: 673 - protein, 114 aa, synthetic construct
EVQLVESGGGSVQAGETLRLSCTASGFTFDDSDMGWYRQAPGDECELVSTISSDGSTNYADSVKGRFTISQDNAKNTVYLQMTSLKPEDTAIYACRTMASRIGCWGQGTLVTVS

SEQ ID NO: 674 - protein, 114 aa, synthetic construct
EVQLVESGGGSVQAGETLRLSCTASGFTFDDSDMGWYRQAPGDECELVSTISSDGSTNYADSVKGRFTISQDNAKNTVYLQMTSLKPEDTAIYLCRTMASRIGCWGQGTLVTVS

SEQ ID NO: 675 - protein, 114 aa, synthetic construct
EVQLVESGGGSVQAGETLRLSCTASGFTFDDSDMGWYRQAPGDECELVSTISSDGSTNYADSVKGRFTISQDNAKNTVYLQMTSLKPEDTAIYPCRTMASRIGCWGQGTLVTVS

SEQ ID NO: 676 - protein, 114 aa, synthetic construct
EVQLVESGGGSVQAGETLRLSCTASGFTFDDSDMGWYRQAPGDECELVSTISSDGSTNYADSVKGRFTISQDNAKNTVYLQMTSLKPEDTAIYSCGTMASRIGCWGQGTLVTVS

SEQ ID NO: 677 - protein, 114 aa, synthetic construct
EVQLVESGGGSVQAGETLRLSCTASGFTFDDSDMGWYRQAPGDECELVSTISSDGSTNYADSVKGRFTISQDNAKNTVYLQMTSLKPEDTAIYSCITMASRIGCWGPGTLVTVS

SEQ ID NO: 678 - protein, 114 aa, synthetic construct
EVQLVESGGGSVQAGETLRLSCTASGFTFDDSDMGWYRQAPGDECELVSTISSDGSTNYADSVKGRFTISQDNAKNTVYLQMTSLKPEDTAIYSCITMASRIGCWGQGTLVTVS

SEQ ID NO: 679 - protein, 116 aa, synthetic construct
EVQLVESGGGSVQAGETLRLSCTASGFTFDDSDMGWYRQAPGDECELVSTISSDGSTNYADSVKGRFTISQDNAKNTVYLQMTSLKPEDTAIYSCIYCRYDGEFAYWGQGTLVTVS

SEQ ID NO: 680 - protein, 114 aa, synthetic construct
EVQLVESGGGSVQAGETLRLSCTASGFTFDDSDMGWYRQAPGDECELVSTISSDGSTNYADSVKGRFTISQDNAKNTVYLQMTSLKPEDTAIYSCKTMASRIGCWGQGTLVTVS

SEQ ID NO: 681 - protein, 114 aa, synthetic construct
EVQLVESGGGSVQAGETLRLSCTASGFTFDDSDMGWYRQAPGDECELVSTISSDGSTNYADSVKGRFTISQDNAKNTVYLQMTSLKPEDTAIYSCRAMASRIGCWGQGTLVTVS

SEQ ID NO: 682 - protein, 114 aa, synthetic construct
EVQLVESGGGSVQAGETLRLSCTASGFTFDDSDMGWYRQAPGDECELVSTISSDGSTNYADSVKGRFTISQDNAKNTVYLQMTSLKPEDTAIYSCRIMASRIGCWGQGTLVTVS

SEQ ID NO: 683 - protein, 114 aa, synthetic construct
EVQLVESGGGSVQAGETLRLSCTASGFTFDDSDMGWYRQAPGDECELVSTISSDGSTNYADSVKGRFTISQDNAKNTVYLQMTSLKPEDTAIYSCRKMASRIGCWGQGTLVTVS

SEQ ID NO: 684 - protein, 114 aa, synthetic construct
EVQLVESGGGSVQAGETLRLSCTASGFTFDDSDMGWYRQAPGDECELVSTISSDGSTNYADSVKGRFTISQDNAKNTVYLQMTSLKPEDTAIYSCRSMASRIGCWGQGTLVTVS

SEQ ID NO: 685 - protein, 114 aa, synthetic construct
EVQLVESGGGSVQAGETLRLSCTASGFTFDDSDMGWYRQAPGDECELVSTISSDGSTNYADSVKGRFTISQDNAKNTVYLQMTSLKPEDTAIYSCRTIASRIGCWGQGTLVTVS

SEQ ID NO: 686 - protein, 114 aa, synthetic construct
EVQLVESGGGSVQAGETLRLSCTASGFTFDDSDMGWYRQAPGDECELVSTISSDGSTNYADSVKGRFTISQDNAKNTVYLQMTSLKPEDTAIYSCRTKASRIGCWGQGTLVTVS

SEQ ID NO: 687 - protein, 114 aa, synthetic construct
EVQLVESGGGSVQAGETLRLSCTASGFTFDDSDMGWYRQAPGDECELVSTISSDGSTNYADSVKGRFTISQDNAKNTVYLQMTSLKPEDTAIYSCRTMALRIGCWGQGTLVTVS

SEQ ID NO: 688 - protein, 114 aa, synthetic construct
EVQLVESGGGSVQAGETLRLSCTASGFTFDDSDMGWYRQAPGDECELVSTISSDGSTNYADSVKGRFTISQDNAKNTVYLQMTSLKPEDTAIYSCRTMAPRIGCWGQGTLVTVS

SEQ ID NO: 689 - protein, 114 aa, synthetic construct
EVQLVESGGGSVQAGETLRLSCTASGFTFDDSDMGWYRQAPGDECELVSTISSDGSTNYADSVKGRFTISQDNAKNTVYLQMTSLKPEDTAIYSCRTMASGIGCWGQGTLVTVS

SEQ ID NO: 690 - protein, 114 aa, synthetic construct
EVQLVESGGGSVQAGETLRLSCTASGFTFDDSDMGWYRQAPGDECELVSTISSDGSTNYADSVKGRFTISQDNAKNTVYLQMTSLKPEDTAIYSCRTMASMIGCWGPGTLVTVS

SEQ ID NO: 691 - protein, 114 aa, synthetic construct
EVQLVESGGGSVQAGETLRLSCTASGFTFDDSDMGWYRQAPGDECELVSTISSDGSTNYADSVKGRFTISQDNAKNTVYLQMTSLKPEDTAIYSCRTMASMIGCWGQGTLVTVS

SEQ ID NO: 692 - protein, 114 aa, synthetic construct
EVQLVESGGGSVQAGETLRLSCTASGFTFDDSDMGWYRQAPGDECELVSTISSDGSTNYADSVKGRFTISQDNAKNTVYLQMTSLKPEDTAIYSCRTMASRIDCWGQGTLVTVS

SEQ ID NO: 693 - protein, 114 aa, synthetic construct
EVQLVESGGGSVQAGETLRLSCTASGFTFDDSDMGWYRQAPGDECELVSTISSDGSTNYADSVKGRFTISQDNAKNTVYLQMTSLKPEDTAIYSCRTMASRIGCCGQGTLVTVS

SEQ ID NO: 694 - protein, 114 aa, synthetic construct
EVQLVESGGGSVQAGETLRLSCTASGFTFDDSDMGWYRQAPGDECELVSTISSDGSTNYADSVKGRFTISQDNAKNTVYLQMTSLKPEDTAIYSCRTMASRIGCLGQGTLVTVS

SEQ ID NO: 695 - protein, 114 aa, synthetic construct
EVQLVESGGGSVQAGETLRLSCTASGFTFDDSDMGWYRQAPGDECELVSTISSDGSTNYADSVKGRFTISQDNAKNTVYLQMTSLKPEDTAIYSCRTMASRIGCRGQGTLVTVS

SEQ ID NO: 696 - protein, 114 aa, synthetic construct
EVQLVESGGGSVQAGETLRLSCTASGFTFDDSDMGWYRQAPGDECELVSTISSDGSTNYADSVKGRFTISQDNAKNTVYLQMTSLKPEDTAIYSCRTMASRIGCWAQGTLVTVS

SEQ ID NO: 697 - protein, 114 aa, synthetic construct
EVQLVESGGGSVQAGETLRLSCTASGFTFDDSDMGWYRQAPGDECELVSTISSDGSTNYADSVKGRFTISQDNAKNTVYLQMTSLKPEDTAIYSCRTMASRIGCWDQGTLVTVS

SEQ ID NO: 698 - protein, 114 aa, synthetic construct
EVQLVESGGGSVQAGETLRLSCTASGFTFDDSDMGWYRQAPGDECELVSTISSDGSTNYADSVKGRFTISQDNAKNTVYLQMTSLKPEDTAIYSCRTMASRIGCWGHGTLVTVS

SEQ ID NO: 699 - protein, 114 aa, synthetic construct
EVQLVESGGGSVQAGETLRLSCTASGFTFDDSDMGWYRQAPGDECELVSTISSDGSTNYADSVKGRFTISQDNAKNTVYLQMTSLKPEDTAIYSCRTMASRIGCWGLGTLVTVS

SEQ ID NO: 700 - protein, 114 aa, synthetic construct
EVQLVESGGGSVQAGETLRLSCTASGFTFDDSDMGWYRQAPGDECELVSTISSDGSTNYADSVKGRFTISQDNAKNTVYLQMTSLKPEDTAIYSCRTMASRIGCWGPGTLATVA

SEQ ID NO: 701 - protein, 114 aa, synthetic construct
EVQLVESGGGSVQAGETLRLSCTASGFTFDDSDMGWYRQAPGDECELVSTISSDGSTNYADSVKGRFTISQDNAKNTVYLQMTSLKPEDTAIYSCRTMASRIGCWGPGTLVTVS

SEQ ID NO: 702 - protein, 114 aa, synthetic construct
EVQLVESGGGSVQAGETLRLSCTASGFTFDDSDMGWYRQAPGDECELVSTISSDGSTNYADSVKGRFTISQDNAKNTVYLQMTSLKPEDTAIYSCRTMASRIGCWGQGALVTVS

SEQ ID NO: 703 - protein, 114 aa, synthetic construct
EVQLVESGGGSVQAGETLRLSCTASGFTFDDSDMGWYRQAPGDECELVSTISSDGSTNYADSVKGRFTISQDNAKNTVYLQMTSLKPEDTAIYSCRTMASRIGCWGQGILVTVS

SEQ ID NO: 704 - protein, 114 aa, synthetic construct
EVQLVESGGGSVQAGETLRLSCTASGFTFDDSDMGWYRQAPGDECELVSTISSDGSTNYADSVKGRFTISQDNAKNTVYLQMTSLKPEDTAIYSCRTMASRIGCWGQGNLVTVS

SEQ ID NO: 705 - protein, 114 aa, synthetic construct
EVQLVESGGGSVQAGETLRLSCTASGFTFDDSDMGWYRQAPGDECELVSTISSDGSTNYADSVKGRFTISQDNAKNTVYLQMTSLKPEDTAIYSCRTMASRIGCWGQGTLATVS

SEQ ID NO: 706 - protein, 114 aa, synthetic construct
EVQLVESGGGSVQAGETLRLSCTASGFTFDDSDMGWYRQAPGDECELVSTISSDGSTNYADSVKGRFTISQDNAKNTVYLQMTSLKPEDTAIYSCRTMASRIGCWGQGTLDTVS

SEQ ID NO: 707 - protein, 114 aa, synthetic construct
EVQLVESGGGSVQAGETLRLSCTASGFTFDDSDMGWYRQAPGDECELVSTISSDGSTNYADSVKGRFTISQDNAKNTVYLQMTSLKPEDTAIYSCRTMASRIGCWGQGTLFTVS

SEQ ID NO: 708 - protein, 114 aa, synthetic construct
EVQLVESGGGSVQAGETLRLSCTASGFTFDDSDMGWYRQAPGDECELVSTISSDGSTNYADSVKGRFTISQDNAKNTVYLQMTSLKPEDTAIYSCRTMASRIGCWGQGTLGTVS

SEQ ID NO: 709 - protein, 114 aa, synthetic construct
EVQLVESGGGSVQAGETLRLSCTASGFTFDDSDMGWYRQAPGDECELVSTISSDGSTNYADSVKGRFTISQDNAKNTVYLQMTSLKPEDTAIYSCRTMASRIGCWGQGTLVAVS

SEQ ID NO: 710 - protein, 114 aa, synthetic construct
EVQLVESGGGSVQAGETLRLSCTASGFTFDDSDMGWYRQAPGDECELVSTISSDGSTNYADSVKGRFTISQDNAKNTVYLQMTSLKPEDTAIYSCRTMASRIGCWGQGTLVLSL

SEQ ID NO: 711 - protein, 114 aa, synthetic construct
EVQLVESGGGSVQAGETLRLSCTASGFTFDDSDMGWYRQAPGDECELVSTISSDGSTNYADSVKGRFTISQDNAKNTVYLQMTSLKPEDTAIYSCRTMASRIGCWGQGTLVMSL

SEQ ID NO: 712 - protein, 114 aa, synthetic construct
EVQLVESGGGSVQAGETLRLSCTASGFTFDDSDMGWYRQAPGDECELVSTISSDGSTNYADSVKGRFTISQDNAKNTVYLQMTSLKPEDTAIYSCRTMASRIGCWGQGTLVNVS

SEQ ID NO: 713 - protein, 114 aa, synthetic construct
EVQLVESGGGSVQAGETLRLSCTASGFTFDDSDMGWYRQAPGDECELVSTISSDGSTNYADSVKGRFTISQDNAKNTVYLQMTSLKPEDTAIYSCRTMASRIGCWGQGTLVSVS

SEQ ID NO: 714 - protein, 114 aa, synthetic construct
EVQLVESGGGSVQAGETLRLSCTASGFTFDDSDMGWYRQAPGDECELVSTISSDGSTNYADSVKGRFTISQDNAKNTVYLQMTSLKPEDTAIYSCRTMASRIGCWGQGTLVTAL

SEQ ID NO: 715 - protein, 114 aa, synthetic construct
EVQLVESGGGSVQAGETLRLSCTASGFTFDDSDMGWYRQAPGDECELVSTISSDGSTNYADSVKGRFTISQDNAKNTVYLQMTSLKPEDTAIYSCRTMASRIGCWGQGTLVTAS

SEQ ID NO: 716 - protein, 114 aa, synthetic construct
EVQLVESGGGSVQAGETLRLSCTASGFTFDDSDMGWYRQAPGDECELVSTISSDGSTNYADSVKGRFTISQDNAKNTVYLQMTSLKPEDTAIYSCRTMASRIGCWGQGTLVTDS

SEQ ID NO: 717 - protein, 114 aa, synthetic construct
EVQLVESGGGSVQAGETLRLSCTASGFTFDDSDMGWYRQAPGDECELVSTISSDGSTNYADSVKGRFTISQDNAKNTVYLQMTSLKPEDTAIYSCRTMASRIGCWGQGTLVTIS

SEQ ID NO: 718 - protein, 114 aa, synthetic construct
EVQLVESGGGSVQAGETLRLSCTASGFTFDDSDMGWYRQAPGDECELVSTISSDGSTNYADSVKGRFTISQDNAKNTVYLQMTSLKPEDTAIYSCRTMASRIGCWGQGTLVTSL

SEQ ID NO: 719 - protein, 114 aa, synthetic construct
EVQLVESGGGSVQAGETLRLSCTASGFTFDDSDMGWYRQAPGDECELVSTISSDGSTNYADSVKGRFTISQDNAKNTVYLQMTSLKPEDTAIYSCRTMASRIGCWGQGTLVTSP

SEQ ID NO: 720 - protein, 114 aa, synthetic construct
EVQLVESGGGSVQAGETLRLSCTASGFTFDDSDMGWYRQAPGDECELVSTISSDGSTNYADSVKGRFTISQDNAKNTVYLQMTSLKPEDTAIYSCRTMASRIGCWGQGTLVTVA

SEQ ID NO: 721 - protein, 114 aa, synthetic construct
EVQLVESGGGSVQAGETLRLSCTASGFTFDDSDMGWYRQAPGDECELVSTISSDGSTNYADSVKGRFTISQDNAKNTVYLQMTSLKPEDTAIYSCRTMASRIGCWGQGTLVTVF

SEQ ID NO: 722 - protein, 114 aa, synthetic construct
EVQLVESGGGSVQAGETLRLSCTASGFTFDDSDMGWYRQAPGDECELVSTISSDGSTNYADSVKGRFTISQDNAKNTVYLQMTSLKPEDTAIYSCRTMASRIGCWGQGTLVTVL

SEQ ID NO: 723 - protein, 114 aa, synthetic construct
EVQLVESGGGSVQAGETLRLSCTASGFTFDDSDMGWYRQAPGDECELVSTISSDGSTNYADSVKGRFTISQDNAKNTVYLQMTSLKPEDTAIYSCRTMASRIGCWGQGTLVTVP

SEQ ID NO: 724 - protein, 114 aa, synthetic construct
EVQLVESGGGSVQAGETLRLSCTASGFTFDDSDMGWYRQAPGDECELVSTISSDGSTNYADSVKGRFTISQDNAKNTVYLQMTSLKPEDTAIYSCRTMASRIGCWGQGTLVTVT

SEQ ID NO: 725 - protein, 114 aa, synthetic construct
EVQLVESGGGSVQAGETLRLSCTASGFTFDDSDMGWYRQAPGDECELVSTISSDGSTNYADSVKGRFTISQDNAKNTVYLQMTSLKPEDTAIYSCRTMASRIGCWGQGTLVTVY

SEQ ID NO: 726 - protein, 114 aa, synthetic construct
EVQLVESGGGSVQAGETLRLSCTASGFTFDDSDMGWYRQAPGDECELVSTISSDGSTNYADSVKGRFTISQDNAKNTVYLQMTSLKPEDTAIYSCRTMASRIGCWGQGTMVTVS

SEQ ID NO: 727 - protein, 114 aa, synthetic construct
EVQLVESGGGSVQAGETLRLSCTASGFTFDDSDMGWYRQAPGDECELVSTISSDGSTNYADSVKGRFTISQDNAKNTVYLQMTSLKPEDTAIYSCRTMASRIGCWGQGTPVTVS

SEQ ID NO: 728 - protein, 114 aa, synthetic construct
EVQLVESGGGSVQAGETLRLSCTASGFTFDDSDMGWYRQAPGDECELVSTISSDGSTNYADSVKGRFTISQDNAKNTVYLQMTSLKPEDTAIYSCRTMASRIGCWGQGTQVTVS

SEQ ID NO: 729 - protein, 114 aa, synthetic construct
EVQLVESGGGSVQAGETLRLSCTASGFTFDDSDMGWYRQAPGDECELVSTISSDGSTNYADSVKGRFTISQDNAKNTVYLQMTSLKPEDTAIYSCRTMASRIGCWGQGTSVTVS

SEQ ID NO: 730 - protein, 114 aa, synthetic construct
EVQLVESGGGSVQAGETLRLSCTASGFTFDDSDMGWYRQAPGDECELVSTISSDGSTNYADSVKGRFTISQDNAKNTVYLQMTSLKPEDTAIYSCRTMASRIGCWGQRTLVTVS

SEQ ID NO: 731 - protein, 114 aa, synthetic construct
EVQLVESGGGSVQAGETLRLSCTASGFTFDDSDMGWYRQAPGDECELVSTISSDGSTNYADSVKGRFTISQDNAKNTVYLQMTSLKPEDTAIYSCRTMASRIGCWGQVTLVTVS

SEQ ID NO: 732 - protein, 114 aa, synthetic construct
EVQLVESGGGSVQAGETLRLSCTASGFTFDDSDMGWYRQAPGDECELVSTISSDGSTNYADSVKGRFTISQDNAKNTVYLQMTSLKPEDTAIYSCRTMASRIGCWGQWTLVTVS

SEQ ID NO: 733 - protein, 114 aa, synthetic construct
EVQLVESGGGSVQAGETLRLSCTASGFTFDDSDMGWYRQAPGDECELVSTISSDGSTNYADSVKGRFTISQDNAKNTVYLQMTSLKPEDTAIYSCRTMASRIGCWGRGTLVTVS

SEQ ID NO: 734 - protein, 114 aa, synthetic construct
EVQLVESGGGSVQAGETLRLSCTASGFTFDDSDMGWYRQAPGDECELVSTISSDGSTNYADSVKGRFTISQDNAKNTVYLQMTSLKPEDTAIYSCRTMASRIGCWRQGTLVTVS

SEQ ID NO: 735 - protein, 114 aa, synthetic construct
EVQLVESGGGSVQAGETLRLSCTASGFTFDDSDMGWYRQAPGDECELVSTISSDGSTNYADSVKGRFTISQDNAKNTVYLQMTSLKPEDTAIYSCRTMASRIGCWSQGTLVTVS

SEQ ID NO: 736 - protein, 114 aa, synthetic construct
EVQLVESGGGSVQAGETLRLSCTASGFTFDDSDMGWYRQAPGDECELVSTISSDGSTNYADSVKGRFTISQDNAKNTVYLQMTSLKPEDTAIYSCRTMASRIGCWVQGTLVTVS

SEQ ID NO: 737 - protein, 114 aa, synthetic construct
EVQLVESGGGSVQAGETLRLSCTASGFTFDDSDMGWYRQAPGDECELVSTISSDGSTNYADSVKGRFTISQDNAKNTVYLQMTSLKPEDTAIYSCRTMASRIGFWGQGTLVTVS

SEQ ID NO: 738 - protein, 114 aa, synthetic construct
EVQLVESGGGSVQAGETLRLSCTASGFTFDDSDMGWYRQAPGDECELVSTISSDGSTNYADSVKGRFTISQDNAKNTVYLQMTSLKPEDTAIYSCRTMASRIGGWGQGTLVTVS

SEQ ID NO: 739 - protein, 114 aa, synthetic construct
EVQLVESGGGSVQAGETLRLSCTASGFTFDDSDMGWYRQAPGDECELVSTISSDGSTNYADSVKGRFTISQDNAKNTVYLQMTSLKPEDTAIYSCRTMASRIGRWGQGTLVTVS

SEQ ID NO: 740 - protein, 114 aa, synthetic construct
EVQLVESGGGSVQAGETLRLSCTASGFTFDDSDMGWYRQAPGDECELVSTISSDGSTNYADSVKGRFTISQDNAKNTVYLQMTSLKPEDTAIYSCRTMASRIGYWGQGTLVTVS

SEQ ID NO: 741 - protein, 114 aa, synthetic construct
EVQLVESGGGSVQAGETLRLSCTASGFTFDDSDMGWYRQAPGDECELVSTISSDGSTNYADSVKGRFTISQDNAKNTVYLQMTSLKPEDTAIYSCRTMASRISCWGQGTLVTVS

SEQ ID NO: 742 - protein, 114 aa, synthetic construct
EVQLVESGGGSVQAGETLRLSCTASGFTFDDSDMGWYRQAPGDECELVSTISSDGSTNYADSVKGRFTISQDNAKNTVYLQMTSLKPEDTAIYSCRTMASRLGCWGQGTLVTVS

SEQ ID NO: 743 - protein, 114 aa, synthetic construct
EVQLVESGGGSVQAGETLRLSCTASGFTFDDSDMGWYRQAPGDECELVSTISSDGSTNYADSVKGRFTISQDNAKNTVYLQMTSLKPEDTAIYSCRTMASRMGGWGQGTLVTGS

SEQ ID NO: 744 - protein, 114 aa, synthetic construct
EVQLVESGGGSVQAGETLRLSCTASGFTFDDSDMGWYRQAPGDECELVSTISSDGSTNYADSVKGRFTISQDNAKNTVYLQMTSLKPEDTAIYSCRTMASRMGGWGQGTLVTVS

SEQ ID NO: 745 - protein, 114 aa, synthetic construct
EVQLVESGGGSVQAGETLRLSCTASGFTFDDSDMGWYRQAPGDECELVSTISSDGSTNYADSVKGRFTISQDNAKNTVYLQMTSLKPEDTAIYSCRTMASRMGGWGQGTRVTVS

SEQ ID NO: 746 - protein, 114 aa, synthetic construct
EVQLVESGGGSVQAGETLRLSCTASGFTFDDSDMGWYRQAPGDECELVSTISSDGSTNYADSVKGRFTISQDNAKNTVYLQMTSLKPEDTAIYSCRTMASSIGCWGQGTLVTVS

SEQ ID NO: 747 - protein, 114 aa, synthetic construct
EVQLVESGGGSVQAGETLRLSCTASGFTFDDSDMGWYRQAPGDECELVSTISSDGSTNYADSVKGRFTISQDNAKNTVYLQMTSLKPEDTAIYSCRTMASWIGCWGQGTLVTVS

SEQ ID NO: 748 - protein, 114 aa, synthetic construct
EVQLVESGGGSVQAGETLRLSCTASGFTFDDSDMGWYRQAPGDECELVSTISSDGSTNYADSVKGRFTISQDNAKNTVYLQMTSLKPEDTAIYSCRTMATRIGCWGQGTLVTVS

SEQ ID NO: 749 - protein, 114 aa, synthetic construct
EVQLVESGGGSVQAGETLRLSCTASGFTFDDSDMGWYRQAPGDECELVSTISSDGSTNYADSVKGRFTISQDNAKNTVYLQMTSLKPEDTAIYSCRTMDSRIGCWGQGTLVTVS

SEQ ID NO: 750 - protein, 114 aa, synthetic construct
EVQLVESGGGSVQAGETLRLSCTASGFTFDDSDMGWYRQAPGDECELVSTISSDGSTNYADSVKGRFTISQDNAKNTVYLQMTSLKPEDTAIYSCRTMSSRIGCWGQGTLVTVS

SEQ ID NO: 751 - protein, 114 aa, synthetic construct
EVQLVESGGGSVQAGETLRLSCTASGFTFDDSDMGWYRQAPGDECELVSTISSDGSTNYADSVKGRFTISQDNAKNTVYLQMTSLKPEDTAIYSCRTMTSRIGCWGQGTLVTVS

SEQ ID NO: 752 - protein, 114 aa, synthetic construct
EVQLVESGGGSVQAGETLRLSCTASGFTFDDSDMGWYRQAPGDECELVSTISSDGSTNYADSVKGRFTISQDNAKNTVYLQMTSLKPEDTAIYSCRTMVSRIGCWGQGTLVTVS

SEQ ID NO: 753 - protein, 114 aa, synthetic construct
EVQLVESGGGSVQAGETLRLSCTASGFTFDDSDMGWYRQAPGDECELVSTISSDGSTNYADSVKGRFTISQDNAKNTVYLQMTSLKPEDTAIYSCRTTASRIGCWGQGTLVTVS

SEQ ID NO: 754 - protein, 114 aa, synthetic construct
EVQLVESGGGSVQAGETLRLSCTASGFTFDDSDMGWYRQAPGDECELVSTISSDGSTNYADSVKGRFTISQDNAKNTVYLQMTSLKPEDTAIYSGRTMASRIGCWGQGTLVTVS

SEQ ID NO: 755 - protein, 114 aa, synthetic construct
EVQLVESGGGSVQAGETLRLSCTASGFTFDDSDMGWYRQAPGDECELVSTISSDGSTNYADSVKGRFTISQDNAKNTVYLQMTSLKPEDTAIYSRRTMASRIGCWGQGTLVTVS

SEQ ID NO: 756 - protein, 114 aa, synthetic construct
EVQLVESGGGSVQAGETLRLSCTASGFTFDDSDMGWYRQAPGDECELVSTISSDGSTNYADSVKGRFTISQDNAKNTVYLQMTSLKPEDTAIYSYRTMASRIGCWGQGTLVTVS

SEQ ID NO: 757 - protein, 114 aa, synthetic construct
EVQLVESGGGSVQAGETLRLSCTASGFTFDDSDMGWYRQAPGDECELVSTISSDGSTNYADSVKGRFTISQDNAKNTVYLQMTSLKPEDTAIYTCRTMASRIGCWGQGTLVTVS

SEQ ID NO: 758 - protein, 114 aa, synthetic construct
EVQLVESGGGSVQAGETLRLSCTASGFTFDDSDMGWYRQAPGDECELVSTISSDGSTNYADSVKGRFTISQDNAKNTVYLQMTSLKPEDTALYSCRTMASRIGCWGQGTLVTVS

SEQ ID NO: 759 - protein, 116 aa, synthetic construct
EVQLVESGGGSVQAGETLRLSCTASGFTFDDSDMGWYRQAPGDECELVSTISSDGSTNYADSVKGRFTISQDNAKNTVYLQMTSLKPEDTAMYSCIYCRYDGEFAYWGQGTLVTVS

SEQ ID NO: 760 - protein, 114 aa, synthetic construct
EVQLVESGGGSVQAGETLRLSCTASGFTFDDSDMGWYRQAPGDECELVSTISSDGSTNYADSVKGRFTISQDNAKNTVYLQMTSLKPEDTAMYSCRTMASRIGCWGQGTLVTVS

SEQ ID NO: 761 - protein, 114 aa, synthetic construct
EVQLVESGGGSVQAGETLRLSCTASGFTFDDSDMGWYRQAPGDECELVSTISSDGSTNYADSVKGRFTISQDNAKNTVYLQMTSLKPEDTATYSCRTMASRIGCWGQGTLVTVS

SEQ ID NO: 762 - protein, 114 aa, synthetic construct
EVQLVESGGGSVQAGETLRLSCTASGFTFDDSDMGWYRQAPGDECELVSTISSDGSTNYADSVKGRFTISQDNAKNTVYLQMTSLKPEDTAVYSCRTMASRIGCWGQGTLVTVS

SEQ ID NO: 763 - protein, 114 aa, synthetic construct
EVQLVESGGGSVQAGETLRLSCTASGFTFDDSDMGWYRQAPGDECELVSTISSDGSTNYADSVKGRFTISQDNAKNTVYLQMTSLKPEDTDIYSCRTMASRIGCWGQGTLVTVS

SEQ ID NO: 764 - protein, 114 aa, synthetic construct
EVQLVESGGGSVQAGETLRLSCTASGFTFDDSDMGWYRQAPGDECELVSTISSDGSTNYADSVKGRFTISQDNAKNTVYLQMTSLKPEDTSIYSCRTMASRIGCWGQGTLVTVS

SEQ ID NO: 765 - protein, 114 aa, synthetic construct
EVQLVESGGGSVQAGETLRLSCTASGFTFDDSDMGWYRQAPGDECELVSTISSDGSTNYADSVKGRFTISQDNAKNTVYLQMTSLKPEDTTIYSCRTMASRIGCWGQGTLVTVS

SEQ ID NO: 766 - protein, 114 aa, synthetic construct
EVQLVESGGGSVQAGETLRLSCTASGFTFDDSDMGWYRQAPGDECELVSTISSDGSTNYADSVKGRFTISQDNAKNTVYLQMTSLKPEDTVIYSCRTMASRIGCWGQGTLVTVS

SEQ ID NO: 767 - protein, 114 aa, synthetic construct
EVQLVESGGGSVQAGETLRLSCTASGFTFDDSDMGWYRQAPGDECELVSTISSDGSTNYADSVKGRFTISQDNAKNTVYLQMTSLKPEGTAIYSCRTMASRIGCWGQGTLVTVS

SEQ ID NO: 768 - protein, 114 aa, synthetic construct
EVQLVESGGGSVQAGETLRLSCTASGFTFDDSDMGWYRQAPGDECELVSTISSDGSTNYADSVKGRFTISQDNAKNTVYLQMTSLKPENTAIYSCRTMASRIGCWGQGTLVTVS

SEQ ID NO: 769 - protein, 114 aa, synthetic construct
EVQLVESGGGSVQAGETLRLSCTASGFTFDDSDMGWYRQAPGDECELVSTISSDGSTNYADSVKGRFTISQDNAKNTVYLQMTSLKPEVTAIYSCRTMASRIGCWGQGTLVTVS

SEQ ID NO: 770 - protein, 114 aa, synthetic construct
EVQLVESGGGSVQAGETLRLSCTASGFTFDDSDMGWYRQAPGDECELVSTISSDGSTNYADSVKGRFTISQDNAKNTVYLQMTSLKPEYTAIYSCRTMASRIGCWGQGTLVTVS

SEQ ID NO: 771 - protein, 114 aa, synthetic construct
EVQLVESGGGSVQAGETLRLSCTASGFTFDDSDMGWYRQAPGDECELVSTISSDGSTNYADSVKGRFTISQDNAKNTVYLQMTSLKPKDTAIYSCRTMASRIGCWGQGTLVTVS

SEQ ID NO: 772 - protein, 114 aa, synthetic construct
EVQLVESGGGSVQAGETLRLSCTASGFTFDDSDMGWYRQAPGDECELVSTISSDGSTNYADSVKGRFTISQDNAKNTVYLQMTSLKPVDTAIYSCRTMASRIGCWGQGTLVTVS

SEQ ID NO: 773 - protein, 114 aa, synthetic construct
EVQLVESGGGSVQAGETLRLSCTASGFTFDDSDMGWYRQAPGDECELVSTISSDGSTNYADSVKGRFTISQDNAKNTVYLQMTSLKSEDTAIYSCRTMASRIGCWGQGTLVTVS

SEQ ID NO: 774 - protein, 114 aa, synthetic construct
EVQLVESGGGSVQAGETLRLSCTASGFTFDDSDMGWYRQAPGDECELVSTISSDGSTNYADSVKGRFTISQDNAKNTVYLQMTSLKTEDTAIYSCRTMASRIGCWGQGTLVTVS

SEQ ID NO: 775 - protein, 114 aa, synthetic construct
EVQLVESGGGSVQAGETLRLSCTASGFTFDDSDMGWYRQAPGDECELVSTISSDGSTNYADSVKGRFTISQDNAKNTVYLQMTSLNPEDTAIYSCRTMASRIGCWGQGTLVTVS

SEQ ID NO: 776 - protein, 114 aa, synthetic construct
EVQLVESGGGSVQAGETLRLSCTASGFTFDDSDMGWYRQAPGDECELVSTISSDGSTNYADSVKGRFTISQDNAKNTVYLQMTSLRPEDTAIYSCRTMASRIGCWGQGTLVTVS

SEQ ID NO: 777 - protein, 114 aa, synthetic construct
EVQLVESGGGSVQAGETLRLSCTASGFTFDDSDMGWYRQAPGDECELVSTISSDGSTNYADSVKGRFTISQDNAKNTVYLQMTSSKPEDTAIYSCRTMASRIGCWGPGTLVTVS

SEQ ID NO: 778 - protein, 114 aa, synthetic construct
EVQLVESGGGSVQAGETLRLSCTASGFTFDDSDMGWYRQAPGDECELVSTISSDGSTNYADSVKGRFTISQDNAKNTVYLQMTSSKPEDTAIYSCRTMASRIGCWGQGTLVTVS

SEQ ID NO: 779 - protein, 114 aa, synthetic construct
EVQLVESGGGSVQAGETLRLSCTASGFTFDDSDMGWYRQAPGDECELVSTISSDGSTNYADSVKGRFTISQDNAKNTVYLQMTSWKPEDTAIYSCRTMASRIGCWGQGTLVTVS

SEQ ID NO: 780 - protein, 114 aa, synthetic construct
EVQLVESGGGSVQAGETLRLSCTASGFTFDDSDMGWYRQAPGDECELVSTISSDGSTNYADSVKGRFTISQDNAKNTVYLQMTTLKPEDTAIYSCRTMASRIGCWGQGTLVTVS

SEQ ID NO: 781 - protein, 114 aa, synthetic construct
EVQLVESGGGSVQAGETLRLSCTASGFTFDDSDMGWYRQAPGDECELVSTISSDGSTNYADSVKGRFTISQDNAKNTVYLQVTSLKPEDTAIYSCRTMASRIGCWGQGTLVTVS

SEQ ID NO: 782 - protein, 114 aa, synthetic construct
EVQLVESGGGSVQAGETLRLSCTASGFTFDDSDMGWYRQAPGDECELVSTISSDGSTNYADSVKGRFTISQDNAKNTVYLRMTSLKPEDTAIYSCRTMASRIGCWGQGTLVTVS

SEQ ID NO: 783 - protein, 114 aa, synthetic construct
EVQLVESGGGSVQAGETLRLSCTASGFTFDDSDMGWYRQAPGDECELVSTISSDGSTNYADSVKGRFTISQDNAKNTVYPQMTSLKPEDTAIYSCRTMASRIGCWGPGTLVTVS

SEQ ID NO: 784 - protein, 114 aa, synthetic construct
EVQLVESGGGSVQAGETLRLSCTASGFTFDDSDMGWYRQAPGDECELVSTISSDGSTNYADSVKGRFTISQDNAKNTVYPQMTSLKPEDTAIYSCRTMASRIGCWGQGTLVTVS

SEQ ID NO: 785 - protein, 114 aa, synthetic construct
EVQLVESGGGSVQAGETLRLSCTASGFTFDDSDMGWYRQAPGDECELVSTISSDGSTNYADSVKGRFTISQDNAKNTVYQQMTSLKPEDTAIYSCRTMASRIGCWGQGTLVTVS

SEQ ID NO: 786 - protein, 114 aa, synthetic construct
EVQLVESGGGSVQAGETLRLSCTASGFTFDDSDMGWYRQAPGDECELVSTISSDGSTNYADSVKGRFTISQDNAKSTVYLQMTSLKPEDTAIYSCRTMASRIGCWGQGTLVTVS

SEQ ID NO: 787 - protein, 114 aa, synthetic construct
EVQLVESGGGSVQAGETLRLSCTASGFTFDDSDMGWYRQAPGDECELVSTISSDGSTNYADSVKGRFTISQDNAKTTVYLQMTSLKPEDTAIYSCRTMASRIGCWGPGTLVTVS

SEQ ID NO: 788 - protein, 114 aa, synthetic construct
EVQLVESGGGSVQAGETLRLSCTASGFTFDDSDMGWYRQAPGDECELVSTISSDGSTNYADSVKGRFTISQDNAKTTVYLQMTSLKPEDTAIYSCRTMASRIGCWGQGTLVTVS

SEQ ID NO: 789 - protein, 114 aa, synthetic construct
EVQLVESGGGSVQAGETLRLSCTASGFTFDDSDMGWYRQAPGDECELVSTISSDGSTNYADSVKGRFTISQDNAKTTVYLQMTSSKPEDTAIYSCRTMASRIGCWGQGTLVTVS

SEQ ID NO: 790 - protein, 114 aa, synthetic construct
EVQLVESGGGSVQAGETLRLSCTASGFTFDDSDMGWYRQAPGDECELVSTISSDGSTNYADSVKGRFTISQDNAKTTVYQQMTSLKPEDTAIYSCRTMASRIGCWGQGTLVTVS

SEQ ID NO: 791 - protein, 114 aa, synthetic construct
EVQLVESGGGSVQAGETLRLSCTASGFTFDDSDMGWYRQAPGDECELVSTISSDGSTNYADSVKGRFTISQDNAKYTVYLQMTSLKPEDTAIYSCRTMASRIGCWGQGTLVTVS

SEQ ID NO: 792 - protein, 114 aa, synthetic construct
EVQLVESGGGSVQAGETLRLSCTASGFTFDDSDMGWYRQAPGDECELVSTISSDGSTNYADSVKGRFTISQDNANNTVYLQMTSLKPEDTAIYSCRTMASRIGCWGQGTLVTVS

SEQ ID NO: 793 - protein, 114 aa, synthetic construct
EVQLVESGGGSVQAGETLRLSCTASGFTFDDSDMGWYRQAPGDECELVSTISSDGSTNYADSVKGRFTISQDNATNTVYLQMTSLKPEDTAIYSCRTMASRIGCWGQGTLVTVS

SEQ ID NO: 794 - protein, 114 aa, synthetic construct
EVQLVESGGGSVQAGETLRLSCTASGFTFDDSDMGWYRQAPGDECELVSTISSDGSTNYADSVKGRFTISQDNEKNTVYLQMTSLKPEDTAIYSCRTMASRIGCWGQGTLVTVS

SEQ ID NO: 795 - protein, 114 aa, synthetic construct
EVQLVESGGGSVQAGETLRLSCTASGFTFDDSDMGWYRQAPGDECELVSTISSDGSTNYADSVKGRFTISQDNTKNTVYLQMTSLKPEDTAIYSCRTMASRIGCWGQGTLVTVS

SEQ ID NO: 796 - protein, 114 aa, synthetic construct
EVQLVESGGGSVQAGETLRLSCTASGFTFDDSDMGWYRQAPGDECELVSTISSDGSTNYADSVKGRFTISQDNVKNTVYLQMTSLKPEDTAIYSCRTMASRIGCWGQGTLVTVS

SEQ ID NO: 797 - protein, 114 aa, synthetic construct
EVQLVESGGGSVQAGETLRLSCTASGFTFDDSDMGWYRQAPGDECELVSTISSDGSTNYADSVKGRFTISQDSAKNTVYLQMTSLKPEDTAIYSCRTMASRIGCWGQGTLVTVS

SEQ ID NO: 798 - protein, 114 aa, synthetic construct
EVQLVESGGGSVQAGETLRLSCTASGFTFDDSDMGWYRQAPGDECELVSTISSDGSTNYADSVKGRFTISQDTAKNTVYLQMTSLKPEDTAIYSCRTMASRIGCWGQGTLVTVS

SEQ ID NO: 799 - protein, 114 aa, synthetic construct
EVQLVESGGGSVQAGETLRLSCTASGFTFDDSDMGWYRQAPGDECELVSTISSDGSTNYADSVKGRFTISQDTAKTTVYLQMTSLKPEDTAIYSCRTMASRIGCWGQGTLVTVS

SEQ ID NO: 800 - protein, 114 aa, synthetic construct
EVQLVESGGGSVQAGETLRLSCTASGFTFDDSDMGWYRQAPGDECELVSTISSDGSTNYADSVKGRFTISQNNAKNTVYLQMTSLKPEDTAIYSCRTMASRIGCWGQGTLVTVS

SEQ ID NO: 801 - protein, 114 aa, synthetic construct
EVQLVESGGGSVQAGETLRLSCTASGFTFDDSDMGWYRQAPGDECELVSTISSDGSTNYADSVKGRFTISQYNAKNTVYLQMTSLKPEDTAIYSCRTMASRIGCWGQGTLVTVS

SEQ ID NO: 802 - protein, 114 aa, synthetic construct
EVQLVESGGGSVQAGETLRLSCTASGFTFDDSDMGWYRQAPGDECELVSTISSDGSTNYADSVKGRFTISRDNAKNTVYLQMTSLKPEDTAIYSCRTMASRIGCWGQGTLVTVS

SEQ ID NO: 803 - protein, 114 aa, synthetic construct
EVQLVESGGGSVQAGETLRLSCTASGFTFDDSDMGWYRQAPGDECELVSTISSDGSTNYADSVKGRFTITQDNAKNTVYLQMTSLKPEDTAIYSCRTMASRIGCWGQGTLVTVS

SEQ ID NO: 804 - protein, 114 aa, synthetic construct
EVQLVESGGGSVQAGETLRLSCTASGFTFDDSDMGWYRQAPGDECELVSTISSDGSTNYADSVKGRFTIYQDNAKNTVYLQMTSLKPEDTAIYSCRTMASRIGCWGQGTLVTVS

SEQ ID NO: 805 - protein, 114 aa, synthetic construct
EVQLVESGGGSVQAGETLRLSCTASGFTFDDSDMGWYRQAPGDECELVSTISSDGSTNYADSVKGRFTTSQDNAKNTVYLQMTSLKPEDTAIYSCRTMASRIGCWGQGTLVTVS

SEQ ID NO: 806 - protein, 114 aa, synthetic construct
EVQLVESGGGSVQAGETLRLSCTASGFTFDDSDMGWYRQAPGDECELVSTISSDGSTNYADSVKGRFTVSQDNAKNTVYLQMTSLKPEDTAIYSCRTMASRIGCWGQGTLVTVS

SEQ ID NO: 807 - protein, 114 aa, synthetic construct
EVQLVESGGGSVQAGETLRLSCTASGFTFDDSDMGWYRQAPGDECELVSTISSDGSTNYADSVKGRITISQDNAKNTVYLQMTSLKPEDTAIYSCRTMASRIGCWGQGTLVTVS

SEQ ID NO: 808 - protein, 114 aa, synthetic construct
EVQLVESGGGSVQAGETLRLSCTASGFTFDDSDMGWYRQAPGDECELVSTISSDGSTNYADSVKGRLTISQDNAKNTVYLQMTSLKPEDTAIYSCRTMASRIGCWGQGTLVTVS

SEQ ID NO: 809 - protein, 114 aa, synthetic construct
EVQLVESGGGSVQAGETLRLSCTASGFTFDDSDMGWYRQAPGDECELVSTISSDGSTNYADSVKGRSTISQDNAKNTVYLQMTSLKPEDTAIYSCRTMASRIGCWGQGTLVTVS

SEQ ID NO: 810 - protein, 114 aa, synthetic construct
EVQLVESGGGSVQAGETLRLSCTASGFTFDDSDMGWYRQAPGDECELVSTISSDGSTNYADSVKGRYTISQDNAKNTVYLQMTSLKPEDTAIYSCRTMASRIGCWGQGTLVTVS

SEQ ID NO: 811 - protein, 114 aa, synthetic construct
EVQLVESGGGSVQAGETLRLSCTASGFTFDDSDMGWYRQAPGDECELVSTISSDGSTNYADSVKRRFTISQDNAKNTVYLQMTSLKPEDTAIYSCRTMASRIGCWGQGTLVTVS

SEQ ID NO: 812 - protein, 114 aa, synthetic construct
EVQLVESGGGSVQAGETLRLSCTASGFTFDDSDMGWYRQAPGDECELVSTISSDGSTNYADSVKVRFTISQDNAKNTVYLQMTSLKPEDTAIYSCRTMASRIGCWGQGTLVTVS

SEQ ID NO: 813 - protein, 114 aa, synthetic construct
EVQLVESGGGSVQAGETLRLSCTASGFTFDDSDMGWYRQAPGDECELVSTISSDGSTNYADSVRGRFTISQDNAKNTVYLQMTSLKPEDTAIYSCRTMASRIGCWGQGTLVTVS

SEQ ID NO: 814 - protein, 114 aa, synthetic construct
EVQLVESGGGSVQAGETLRLSCTASGFTFDDSDMGWYRQAPGDECELVSTISSDGSTNYADTVKGRFTISQDNAKNTVYLQMTSLKPEDTAIYSCRTMASRIGCWGQGTLVTVS

SEQ ID NO: 815 - protein, 114 aa, synthetic construct
EVQLVESGGGSVQAGETLRLSCTASGFTFDDSDMGWYRQAPGDECELVSTISSDGSTNYAHSVKGRFTISQDNAKNTVYLQMTSLKPEDTAIYSCRTMASRIGCWGQGTLVTVS

SEQ ID NO: 816 - protein, 114 aa, synthetic construct
EVQLVESGGGSVQAGETLRLSCTASGFTFDDSDMGWYRQAPGDECELVSTISSDGSTNYANSVKGRFTISQDNAKNTVYLQMTSLKPEDTAIYSCRTMASRIGCWGQGTLVTVS

SEQ ID NO: 817 - protein, 114 aa, synthetic construct
EVQLVESGGGSVQAGETLRLSCTASGFTFDDSDMGWYRQAPGDECELVSTISSDGSTNYAVSVKGRFTISQDNAKNTVYLQMTSLKPEDTAIYSCRTMASRIGCWGQGTLVTVS

SEQ ID NO: 818 - protein, 114 aa, synthetic construct
EVQLVESGGGSVQAGETLRLSCTASGFTFDDSDMGWYRQAPGDECELVSTISSDGSTNYAYSVKGRFTISQDNAKNTVYLQMTSLKPEDTAIYSCRTMASRIGCWGQGTLVTVS

SEQ ID NO: 819 - protein, 114 aa, synthetic construct
EVQLVESGGGSVQAGETLRLSCTASGFTFDDSDMGWYRQAPGDECELVSTISSDGSTNYSDSVKGRFTISQDNAKNTVYLQMTSLKPEDTAIYSCRTMASRIGCWGQGTLVTVS

SEQ ID NO: 820 - protein, 114 aa, synthetic construct
EVQLVESGGGSVQAGETLRLSCTASGFTFDDSDMGWYRQAPGDECELVSTISSDGSTNYTDSVKGRFTISQDNAKNTVYLQMTSLKPEDTAIYSCRTMASRIGCWGQGTLVTVS

SEQ ID NO: 821 - protein, 114 aa, synthetic construct
EVQLVESGGGSVQAGETLRLSCTASGFTFDDSDMGWYRQAPGDECELVSTISSDGSTNYVDSVKGRFTISQDNAKNTVYLQMTSLKPEDTAIYSCRTMASRIGCWGQGTLVTVS

SEQ ID NO: 822 - protein, 114 aa, synthetic construct
EVQLVESGGGSVQAGETLRLSCTASGFTFDDSDMGWYRQAPGDECELVSTISSDSSTNYADSVKGRFTISQDNAKNTVYLQMTSLKPEDTAIYSCRTMASRIGCWGQGTLVTVS

SEQ ID NO: 823 - protein, 114 aa, synthetic construct
EVQLVESGGGSVQAGETLRLSCTASGFTFDDSDMGWYRQAPGDECELVSTISSGGSTNYADSVKGRFTISQDNAKNTVYLQMTSLKPEDTAIYSCRTMASRIGCWGQGTLVTVS

SEQ ID NO: 824 - protein, 114 aa, synthetic construct
EVQLVESGGGSVQAGETLRLSCTASGFTFDDSDMGWYRQAPGDECELVSTISSNGSTNYADSVKGRFTISQDNAKNTVYLQMTSLKPEDTAIYSCRTMASRIGCWGQGTLVTVS

SEQ ID NO: 825 - protein, 114 aa, synthetic construct
EVQLVESGGGSVQAGETLRLSCTASGFTFDDSDMGWYRQAPGDECELVSTISSYGSTNYADSVKGRFTISQDNAKNTVYLQMTSLKPEDTAIYSCRTMASRIGCWGQGTLVTVS

SEQ ID NO: 826 - protein, 114 aa, synthetic construct
EVQLVESGGGSVQAGETLRLSCTASGFTFDDSDMGWYRQAPGDECELVSTITSDGSTNYADSVKGRFTISQDNAKNTVYLQMTSLKPEDTAIYSCRTMASRIGCWGQGTLVTVS

SEQ ID NO: 827 - protein, 114 aa, synthetic construct
EVQLVESGGGSVQAGETLRLSCTASGFTFDDSDMGWYRQAPGDECELVSTTSSDGSTNYADSVKGRFTISQDNAKNTVYLQMTSLKPEDTAIYSCRTMASRIGCWGQGTLVTVS

SEQ ID NO: 828 - protein, 114 aa, synthetic construct
EVQLVESGGGSVQAGETLRLSCTASGFTFDDSDMGWYRQAPGDECEPVSTISSDGSTNYADSVKGRFTISQDNAKNTVYLQMTSLKPEDTAIYSCRTMASRIGCWGQGTLVTVS

SEQ ID NO: 829 - protein, 114 aa, synthetic construct
EVQLVESGGGSVQAGETLRLSCTASGFTFDDSDMGWYRQAPGDECGLVSTISSDGSTNYADSVKGRFTISQDNAKNTVYLQMTSLKPEDTAIYSCRTMASRIGCWGQGTLVTVS

SEQ ID NO: 830 - protein, 114 aa, synthetic construct
EVQLVESGGGSVQAGETLRLSCTASGFTFDDSDMGWYRQAPGDECKLVSTISSDGSTNYADSVKGRFTISQDNAKNTVYLQMTSLKPEDTAIYSCRTMASRIGCWGQGTLVTVS

SEQ ID NO: 831 - protein, 114 aa, synthetic construct
EVQLVESGGGSVQAGETLRLSCTASGFTFDDSDMGWYRQAPGDECQLVSTISSDGSTNYADSVKGRFTISQDNAKNTVYLQMTSLKPEDTAIYSCRTMASRIGCWGQGTLVTVS

SEQ ID NO: 832 - protein, 114 aa, synthetic construct
EVQLVESGGGSVQAGETLRLSCTASGFTFDDSDMGWYRQAPGDECVLVSTISSDGSTNYADSVKGRFTISQDNAKNTVYLQMTSLKPEDTAIYSCRTMASRIGCWGQGTLVTVS

SEQ ID NO: 833 - protein, 114 aa, synthetic construct
EVQLVESGGGSVQAGETLRLSCTASGFTFDDSDMGWYRQAPGDEFELVSTISSDGSTNYADSVKGRFTISQDNAKNTVYLQMTSLKPEDTAIYSCRTMASRIGCWGQGTLVTVS

SEQ ID NO: 834 - protein, 114 aa, synthetic construct
EVQLVESGGGSVQAGETLRLSCTASGFTFDDSDMGWYRQAPGDERELVSTISSDGSTNYADSVKGRFTISQDNAKNTVYLQMTSLKPEDTAIYSCRTMASRIGCWGQGTLVTVS

SEQ ID NO: 835 - protein, 114 aa, synthetic construct
EVQLVESGGGSVQAGETLRLSCTASGFTFDDSDMGWYRQAPGDESELVSTISSDGSTNYADSVKGRFTISQDNAKNTVYLQMTSLKPEDTAIYSCRTMASRIGCWGQGTLVTVS

SEQ ID NO: 836 - protein, 114 aa, synthetic construct
EVQLVESGGGSVQAGETLRLSCTASGFTFDDSDMGWYRQAPGDEYELVSTISSDGSTNYADSVKGRFTISQDNAKNTVYLQMTSLKPEDTAIYSCRTMASRIGCWGQGTLVTVS

SEQ ID NO: 837 - protein, 114 aa, synthetic construct
EVQLVESGGGSVQAGETLRLSCTASGFTFDDSDMGWYRQAPGDGCELVSTISSDGSTNYADSVKGRFTISQDNAKNTVYLQMTSLKPEDTAIYSCRTMASRIGCWGQGTLVTVS

SEQ ID NO: 838 - protein, 114 aa, synthetic construct
EVQLVESGGGSVQAGETLRLSCTASGFTFDDSDMGWYRQAPGDKCELVSTISSDGSTNYADSVKGRFTISQDNAKNTVYLQMTSLKPEDTAIYSCRTMASRIGCWGQGTLVTVS

SEQ ID NO: 839 - protein, 114 aa, synthetic construct
EVQLVESGGGSVQAGETLRLSCTASGFTFDDSDMGWYRQAPGDVCELVSTISSDGSTNYADSVKGRFTISQDNAKNTVYLQMTSLKPEDTAIYSCRTMASRIGCWGQGTLVTVS

SEQ ID NO: 840 - protein, 114 aa, synthetic construct
EVQLVESGGGSVQAGETLRLSCTASGFTFDDSDMGWYRQAPGEECELVSTISSDGSTNYADSVKGRFTISQDNAKNTVYLQMTSLKPEDTAIYSCRTMASRIGCWGQGTLVTVS

SEQ ID NO: 841 - protein, 114 aa, synthetic construct
EVQLVESGGGSVQAGETLRLSCTASGFTFDDSDMGWYRQAPGNECELVSTISSDGSTNYADSVKGRFTISQDNAKNTVYLQMTSLKPEDTAIYSCRTMASRIGCWGQGTLVTVS

SEQ ID NO: 842 - protein, 114 aa, synthetic construct
EVQLVESGGGSVQAGETLRLSCTASGFTFDDSDMGWYRQAPGVECELVSTISSDGSTNYADSVKGRFTISQDNAKNTVYLQMTSLKPEDTAIYSCRTMASRIGCWGQGTLVTVS

SEQ ID NO: 843 - protein, 114 aa, synthetic construct
EVQLVESGGGSVQAGETLRLSCTASGFTFDDSDMGWYRQAPGYECELVSTISSDGSTNYADSVKGRFTISQDNAKNTVYLQMTSLKPEDTAIYSCRTMASRIGCWGQGTLVTVS

SEQ ID NO: 844 - protein, 114 aa, synthetic construct
EVQLVESGGGSVQAGETLRLSCTASGFTFDDSDMGWYRQAPSDECELVSTISSDGSTNYADSVKGRFTISQDNAKNTVYLQMTSLKPEDTAIYSCRTMASRIGCWGQGTLVTVS

SEQ ID NO: 845 - protein, 114 aa, synthetic construct
EVQLVESGGGSVQAGETLRLSCTASGFTFDDSDMGWYRQAPVDECELVSTISSDGSTNYADSVKGRFTISQDNAKNTVYLQMTSLKPEDTAIYSCRTMASRIGCWGQGTLVTVS

SEQ ID NO: 846 - protein, 114 aa, synthetic construct
EVQLVESGGGSVQAGETLRLSCTASGFTFDDSDMGWYRQASGDECELVSTISSDGSTNYADSVKGRFTISQDNAKNTVYLQMTSLKPEDTAIYSCRTMASRIGCWGQGTLVTVS

SEQ ID NO: 847 - protein, 114 aa, synthetic construct
EVQLVESGGGSVQAGETLRLSCTASGFTFDDSDMGWYRQPPGDECELVSTISSDGSTNYADSVKGRFTISQDNAKNTVYLQMTSLKPEDTAIYSCRTMASRIGCWGQGTLVTVS

SEQ ID NO: 848 - protein, 114 aa, synthetic construct
EVQLVESGGGSVQAGETLRLSCTASGFTFDDSDMGWYRQSPGDECELVSTISSDGSTNYADSVKGRFTISQDNAKNTVYLQMTSLKPEDTAIYSCRTMASRIGCWGQGTLVTVS

SEQ ID NO: 849 - protein, 114 aa, synthetic construct
EVQLVESGGGSVQAGETLRLSCTASGFTFDDSDMGWYRQTPGDECELVSTISSDGSTNYADSVKGRFTISQDNAKNTVYLQMTSLKPEDTAIYSCRTMASRIGCWGQGTLVTVS

SEQ ID NO: 850 - protein, 114 aa, synthetic construct
EVQLVESGGGSVQAGETLRLSCTASGFTFDDSDMGWYRQVPGDECELVSTISSDGSTNYADSVKGRFTISQDNAKNTVYLQMTSLKPEDTAIYSCRTMASRIGCWGQGTLVTVS

SEQ ID NO: 851 - protein, 114 aa, synthetic construct
EVQLVESGGGSVQAGETLRLSCTASGFTFDDSDMGWYRRAPGDECELVSTISSDGSTNYADSVKGRFTISQDNAKNTVYLQMTSLKPEDTAIYSCRTMASRIGCWGQGTLVTVS

SEQ ID NO: 852 - protein, 114 aa, synthetic construct
EVQLVESGGGSVQAGETLRLSCTASGFTFDDSDMGWYSQAPGDECELVSTISSDGSTNYADSVKGRFTISQDNAKNTVYLQMTSLKPEDTAIYSCRTMASRIGCWGQGTLVTVS

SEQ ID NO: 853 - protein, 114 aa, synthetic construct
EVQLVESGGGSVQAGETLRLSCTASGFTFDDSDMGWYWQAPGDECELVSTISSDGSTNYADSVKGRFTISQDNAKNTVYLQMTSLKPEDTAIYSCRTMASRIGCWGQGTLVTVS

SEQ ID NO: 854 - protein, 114 aa, synthetic construct
EVQLVESGGGSVQAGETLRLSCTASGFTFDDSDMSWYRQAPGDECELVSTISSDGSTNYADSVKGRFTISQDNAKNTVYLQMTSLKPEDTAIYSCRTMASRIGCWGQGTLVTVS

SEQ ID NO: 855 - protein, 114 aa, synthetic construct
EVQLVESGGGSVQAGETLRLSCTASGFTFDDSDMVWYRQAPGDECELVSTISSDGSTNYADSVKGRFTISQDNAKNTVYLQMTSLKPEDTAIYSCRTMASRIGCWGQGTLVTVS

SEQ ID NO: 856 - protein, 114 aa, synthetic construct
EVQLVESGGGSVQAGETLRLSCTASGFTFDDSDRGWYRQAPGDECELVSTISSDGSTNYADSVKGRFTISQDNAKNTVYLQMTSLKPEDTAIYSCRTMASRIGCWGQGTLVTVS

SEQ ID NO: 857 - protein, 114 aa, synthetic construct
EVQLVESGGGSVQAGETLRLSCTASGFTFDDSDVGWYRQAPGDECELVSTISSDGSTNYADSVKGRFTISQDNAKNTVYLQMTSLKPEDTAIYSCRTMASRIGCWGQGTLVTVS

SEQ ID NO: 858 - protein, 114 aa, synthetic construct
EVQLVESGGGSVQAGETLRLSCTASGFTFDDSEMGWYRQAPGDECELVSTISSDGSTNYADSVKGRFTISQDNAKNTVYLQMTSLKPEDTAIYSCRTMASRIGCWGQGTLVTVS

SEQ ID NO: 859 - protein, 114 aa, synthetic construct
EVQLVESGGGSVQAGETLRLSCTASGFTFDDSGMGWYRQAPGDECELVSTISSDGSTNYADSVKGRFTISQDNAKNTVYLQMTSLKPEDTAIYSCRTMASRIGCWGQGTLVTVS

SEQ ID NO: 860 - protein, 114 aa, synthetic construct
EVQLVESGGGSVQAGETLRLSCTASGFTFDDSNMGWYRQAPGDECELVSTISSDGSTNYADSVKGRFTISQDNAKNTVYLQMTSLKPEDTAIYSCRTMASRIGCWGQGTLVTVS

SEQ ID NO: 861 - protein, 114 aa, synthetic construct
EVQLVESGGGSVQAGETLRLSCTASGFTFDDSVMGWYRQAPGDECELVSTISSDGSTNYADSVKGRFTISQDNAKNTVYLQMTSLKPEDTAIYSCRTMASRIGCWGQGTLVTVS

SEQ ID NO: 862 - protein, 114 aa, synthetic construct
EVQLVESGGGSVQAGETLRLSCTASGFTFDDSYMGWYRQAPGDECELVSTISSDGSTNYADSVKGRFTISQDNAKNTVYLQMTSLKPEDTAIYSCRTMASRIGCWGQGTLVTVS

SEQ ID NO: 863 - protein, 114 aa, synthetic construct
EVQLVESGGGSVQAGETLRLSCTASGFTFDESDMGWYRQAPGDECELVSTISSDGSTNYADSVKGRFTISQDNAKNTVYLQMTSLKPEDTAIYSCRTMASRIGCWGQGTLVTVS

SEQ ID NO: 864 - protein, 114 aa, synthetic construct
EVQLVESGGGSVQAGETLRLSCTASGFTFDGSDMGWYRQAPGDECELVSTISSDGSTNYADSVKGRFTISQDNAKNTVYLQMTSLKPEDTAIYSCRTMASRIGCWGQGTLVTVS

SEQ ID NO: 865 - protein, 114 aa, synthetic construct
EVQLVESGGGSVQAGETLRLSCTASGFTFDNSDMGWYRQAPGDECELVSTISSDGSTNYADSVKGRFTISQDNAKNTVYLQMTSLKPEDTAIYSCRTMASRIGCWGQGTLVTVS

SEQ ID NO: 866 - protein, 114 aa, synthetic construct
EVQLVESGGGSVQAGETLRLSCTASGFTFDVSDMGWYRQAPGDECELVSTISSDGSTNYADSVKGRFTISQDNAKNTVYLQMTSLKPEDTAIYSCRTMASRIGCWGQGTLVTVS

SEQ ID NO: 867 - protein, 114 aa, synthetic construct
EVQLVESGGGSVQAGETLRLSCTASGFTFDYSDMGWYRQAPGDECELVSTISSDGSTNYADSVKGRFTISQDNAKNTVYLQMTSLKPEDTAIYSCRTMASRIGCWGQGTLVTVS

SEQ ID NO: 868 - protein, 114 aa, synthetic construct
EVQLVESGGGSVQAGETLRLSCTASGFTFEDSDMGWYRQAPGDECELVSTISSDGSTNYADSVKGRFTISQDNAKNTVYLQMTSLKPEDTAIYSCRTMASRIGCWGQGTLVTVS

SEQ ID NO: 869 - protein, 114 aa, synthetic construct
EVQLVESGGGSVQAGETLRLSCTASGFTFGDSDMGWYRQAPGDECELVSTISSDGSTNYADSVKGRFTISQDNAKNTVYLQMTSLKPEDTAIYSCRTMASRIGCWGQGTLVTVS

SEQ ID NO: 870 - protein, 114 aa, synthetic construct
EVQLVESGGGSVQAGETLRLSCTASGFTFNDSDMGWYRQAPGDECELVSTISSDGSTNYADSVKGRFTISQDNAKNTVYLQMTSLKPEDTAIYSCRTMASRIGCWGQGTLVTVS

SEQ ID NO: 871 - protein, 114 aa, synthetic construct
EVQLVESGGGSVQAGETLRLSCTASGFTFVDSDMGWYRQAPGDECELVSTISSDGSTNYADSVKGRFTISQDNAKNTVYLQMTSLKPEDTAIYSCRTMASRIGCWGQGTLVTVS

SEQ ID NO: 872 - protein, 114 aa, synthetic construct
EVQLVESGGGSVQAGETLRLSCTASGFTFYDSDMGWYRQAPGDECELVSTISSDGSTNYADSVKGRFTISQDNAKNTVYLQMTSLKPEDTAIYSCRTMASRIGCWGQGTLVTVS

SEQ ID NO: 873 - protein, 114 aa, synthetic construct
EVQLVESGGGSVQAGETLRLSCTASGFTIDDSDMGWYRQAPGDECELVSTISSDGSTNYADSVKGRFTISQDNAKNTVYLQMTSLKPEDTAIYSCRTMASRIGCWGQGTLVTVS

SEQ ID NO: 874 - protein, 114 aa, synthetic construct
EVQLVESGGGSVQAGETLRLSCTASGFTLDDSDMGWYRQAPGDECELVSTISSDGSTNYADSVKGRFTISQDNAKNTVYLQMTSLKPEDTAIYSCRTMASRIGCWGQGTLVTVS

SEQ ID NO: 875 - protein, 114 aa, synthetic construct
EVQLVESGGGSVQAGETLRLSCTASGFTSDDSDMGWYRQAPGDECELVSTISSDGSTNYADSVKGRFTISQDNAKNTVYLQMTSLKPEDTAIYSCRTMASRIGCWGQGTLVTVS

SEQ ID NO: 876 - protein, 114 aa, synthetic construct
EVQLVESGGGSVQAGETLRLSCTASGFTVDDSDMGWYRQAPGDECELVSTISSDGSTNYADSVKGRFTISQDNAKNTVYLQMTSLKPEDTAIYSCRTMASRIGCWGQGTLVTVS

SEQ ID NO: 877 - protein, 114 aa, synthetic construct
EVQLVESGGGSVQAGETLRLSCTASGFTYDDSDMGWYRQAPGDECELVSTISSDGSTNYADSVKGRFTISQDNAKNTVYLQMTSLKPEDTAIYSCRTMASRIGCWGQGTLVTVS

SEQ ID NO: 878 - protein, 114 aa, synthetic construct
EVQLVESGGGSVQAGETLRLSCTASGLTFDDSDMGWYRQAPGDECELVSTISSDGSTNYADSVKGRFTISQDNAKNTVYLQMTSLKPEDTAIYSCRTMASRIGCWGQGTLVTVS

SEQ ID NO: 879 - protein, 114 aa, synthetic construct
EVQLVESGGGSVQAGETLRLSCTASGSTFDDSDMGWYRQAPGDECELVSTISSDGSTNYADSVKGRFTISQDNAKNTVYLQMTSLKPEDTAIYSCRTMASRIGCWGQGTLVTVS

SEQ ID NO: 880 - protein, 114 aa, synthetic construct
EVQLVESGGGSVQAGETLRLSCTASGVTFDDSDMGWYRQAPGDECELVSTISSDGSTNYADSVKGRFTISQDNAKNTVYLQMTSLKPEDTAIYSCRTMASRIGCWGQGTLVTVS

SEQ ID NO: 881 - protein, 114 aa, synthetic construct
EVQLVESGGGSVQAGETLRLSCTASSFTFDDSDMGWYRQAPGDECELVSTISSDGSTNYADSVKGRFTISQDNAKNTVYLQMTSLKPEDTAIYSCRTMASRIGCWGQGTLVTVS

SEQ ID NO: 882 - protein, 114 aa, synthetic construct
EVQLVESGGGSVQAGETLRLSCTASVFTFDDSDMGWYRQAPGDECELVSTISSDGSTNYADSVKGRFTISQDNAKNTVYLQMTSLKPEDTAIYSCRTMASRIGCWGQGTLVTVS

SEQ ID NO: 883 - protein, 114 aa, synthetic construct
EVQLVESGGGSVQAGETLRLSCTATGFTFDDSDMGWYRQAPGDECELVSTISSDGSTNYADSVKGRFTISQDNAKNTVYLQMTSLKPEDTAIYSCRTMASRIGCWGQGTLVTVS

SEQ ID NO: 884 - protein, 114 aa, synthetic construct
EVQLVESGGGSVQAGETLRLSCTAYGFTFDDSDMGWYRQAPGDECELVSTISSDGSTNYADSVKGRFTISQDNAKNTVYLQMTSLKPEDTAIYSCRTMASRIGCWGQGTLVTVS

SEQ ID NO: 885 - protein, 114 aa, synthetic construct
EVQLVESGGGSVQAGETLRLSCTESGFTFDDSDMGWYRQAPGDECELVSTISSDGSTNYADSVKGRFTISQDNAKNTVYLQMTSLKPEDTAIYSCRTMASRIGCWGQGTLVTVS

SEQ ID NO: 886 - protein, 114 aa, synthetic construct
EVQLVESGGGSVQAGETLRLSCTTSGFTFDDSDMGWYRQAPGDECELVSTISSDGSTNYADSVKGRFTISQDNAKNTVYLQMTSLKPEDTAIYSCRTMASRIGCWGQGTLVTVS

SEQ ID NO: 887 - protein, 114 aa, synthetic construct
EVQLVESGGGSVQAGETLRLSCTVSGFTFDDSDMGWYRQAPGDECELVSTISSDGSTNYADSVKGRFTISQDNAKNTVYLQMTSLKPEDTAIYSCRTMASRIGCWGQGTLVTVS

SEQ ID NO: 888 - protein, 114 aa, synthetic construct
EVQLVESGGGSVQAGETLRLSFTASGFTFDDSDMGWYRQAPGDECELVSTISSDGSTNYADSVKGRFTISQDNAKNTVYLQMTSLKPEDTAIYSCRTMASRIGCWGQGTLVTVS

SEQ ID NO: 889 - protein, 114 aa, synthetic construct
EVQLVESGGGSVQAGETLRLSGTASGFTFDDSDMGWYRQAPGDECELVSTISSDGSTNYADSVKGRFTISQDNAKNTVYLQMTSLKPEDTAIYSCRTMASRIGCWGQGTLVTVS

SEQ ID NO: 890 - protein, 114 aa, synthetic construct
EVQLVESGGGSVQAGETLRLSRTASGFTFDDSDMGWYRQAPGDECELVSTISSDGSTNYADSVKGRFTISQDNAKNTVYLQMTSLKPEDTAIYSCRTMASRIGCWGQGTLVTVS

SEQ ID NO: 891 - protein, 114 aa, synthetic construct
EVQLVESGGGSVQAGETLRLSSTASGFTFDDSDMGWYRQAPGDECELVSTISSDGSTNYADSVKGRFTISQDNAKNTVYLQMTSLKPEDTAIYSCRTMASRIGCWGQGTLVTVS

SEQ ID NO: 892 - protein, 114 aa, synthetic construct
EVQLVESGGGSVQAGETLRLSYTASGFTFDDSDMGWYRQAPGDECELVSTISSDGSTNYADSVKGRFTISQDNAKNTVYLQMTSLKPEDTAIYSCRTMASRIGCWGQGTLVTVS

SEQ ID NO: 893 - protein, 114 aa, synthetic construct
EVQLVESGGGSVQAGETLRLTCTASGFTFDDSDMGWYRQAPGDECELVSTISSDGSTNYADSVKGRFTISQDNAKNTVYLQMTSLKPEDTAIYSCRTMASRIGCWGQGTLVTVS

SEQ ID NO: 894 - protein, 114 aa, synthetic construct
EVQLVESGGGSVQAGETLRLYCTASGFTFDDSDMGWYRQAPGDECELVSTISSDGSTNYADSVKGRFTISQDNAKNTVYLQMTSLKPEDTAIYSCRTMASRIGCWGQGTLVTVS

SEQ ID NO: 895 - protein, 114 aa, synthetic construct
EVQLVESGGGSVQAGETLRPSCTASGFTFDDSDMGWYRQAPGDECELVSTISSDGSTNYADSVKGRFTISQDNAKNTVYLQMTSLKPEDTAIYSCRTMASRIGCWGQGTLVTVS

SEQ ID NO: 896 - protein, 114 aa, synthetic construct
EVQLVESGGGSVQAGETLRRSCTASGFTFDDADMGWYRQAPGDECELVSTISSDGSTNYADSVKGRFTISQDNAKNTVYLQMTSLKPEDTAIYSCRTMASRIGCWGQGTLVTVS

SEQ ID NO: 897 - protein, 114 aa, synthetic construct
EVQLVESGGGSVQAGETLRRSCTASGFTFDDSDMGWYRQAPGDECELVSTISSDGSTNYADSVKGRFTISQDNAKNTVYLQMTSLKPEDTAIYSCRTMASRIGCWGQGTLVTVS

SEQ ID NO: 898 - protein, 114 aa, synthetic construct
EVQLVESGGGSVQAGETLWLSCTASGFTFDDSDMGWYRQAPGDECELVSTISSDGSTNYADSVKGRFTISQDNAKNTVYLQMTSLKPEDTAIYSCRTMASRIGCWGQGTLVTVS

SEQ ID NO: 899 - protein, 114 aa, synthetic construct
EVQLVESGGGSVQAGETPRLSCTASGFTFDDSDMGWYRQAPGDECELVSTISSDGSTNYADSVKGRFTISQDNAKNTVYLQMTSLKPEDTAIYSCRTMASRIGCWGQGTLVTVS

SEQ ID NO: 900 - protein, 114 aa, synthetic construct
EVQLVESGGGSVQAGGTLRLSCTASGFTFDDSDMGWYRQAPGDECELVSTISSDGSTNYADSVKGRFTISQDNAKNTVYLQMTSLKPEDTAIYSCRTMASRIGCWGQGTLVTVS

SEQ ID NO: 901 - protein, 114 aa, synthetic construct
EVQLVESGGGSVQAGKTLRLSCTASGFTFDDSDMGWYRQAPGDECELVSTISSDGSTNYADSVKGRFTISQDNAKNTVYLQMTSLKPEDTAIYSCRTMASRIGCWGQGTLVTVS

SEQ ID NO: 902 - protein, 114 aa, synthetic construct
EVQLVESGGGSVQAGVTLRLSCTASGFTFDDSDMGWYRQAPGDECELVSTISSDGSTNYADSVKGRFTISQDNAKNTVYLQMTSLKPEDTAIYSCRTMASRIGCWGQGTLVTVS

SEQ ID NO: 903 - protein, 114 aa, synthetic construct
EVQLVESGGGSVQASETLRLSCTASGFTFDDSDMGWYRQAPGDECELVSTISSDGSTNYADSVKGRFTISQDNAKNTVYLQMTSLKPEDTAIYSCRTMASRIGCWGQGTLVTVS

SEQ ID NO: 904 - protein, 114 aa, synthetic construct
EVQLVESGGGSVQAVETLRLSCTASGFTFDDSDMGWYRQAPGDECELVSTISSDGSTNYADSVKGRFTISQDNAKNTVYLQMTSLKPEDTAIYSCRTMASRIGCWGQGTLVTVS

SEQ ID NO: 905 - protein, 114 aa, synthetic construct
EVQLVESGGGSVQSGETLRLSCTASGFTFDDSDMGWYRQAPGDECELVSTISSDGSTNYADSVKGRFTISQDNAKNTVYLQMTSLKPEDTAIYSCRTMASRIGCWGQGTLVTVS

SEQ ID NO: 906 - protein, 114 aa, synthetic construct
EVQLVESGGGSVQVGETLRLSCTASGFTFDDSDMGWYRQAPGDECELVSTISSDGSTNYADSVKGRFTISQDNAKNTVYLQMTSLKPEDTAIYSCRTMASRIGCWGQGTLVTVS

SEQ ID NO: 907 - protein, 114 aa, synthetic construct
EVQLVESGGGSVRAGETLRLSCTASGFTFDDSDMGWYRQAPGDECELVSTISSDGSTNYADSVKGRFTISQDNAKNTVYLQMTSLKPEDTAIYSCRTMASRIGCWGQGTLVTVS

SEQ ID NO: 908 - protein, 114 aa, synthetic construct
EVQLVESGGRSVQAGETLRLSCTASGFTFDDSDMGWYRQAPGDECELVSTISSDGSTNYADSVKGRFTISQDNAKNTVYLQMTSLKPEDTAIYSCRTMASRIGCWGQGTLVTVS

SEQ ID NO: 909 - protein, 114 aa, synthetic construct
EVQLVESGGVSVQAGETLRLSCTASGFTFDDSDMGWYRQAPGDECELVSTISSDGSTNYADSVKGRFTISQDNAKNTVYLQMTSLKPEDTAIYSCRTMASRIGCWGQGTLVTVS

SEQ ID NO: 910 - protein, 114 aa, synthetic construct
EVQLVESGRGSVQAGETLRLSCTASGFTFDDSDMGWYRQAPGDECELVSTISSDGSTNYADSVKGRFTISQDNAKNTVYLQMTSLKPEDTAIYSCRTMASRIGCWGQGTLVTVS

SEQ ID NO: 911 - protein, 114 aa, synthetic construct
EVQLVESGSGSVQAGETLRLSCTASGFTFDDSDMGWYRQAPGDECELVSTISSDGSTNYADSVKGRFTISQDNAKNTVYLQMTSLKPEDTAIYSCRTMASRIGCWGQGTLVTVS

SEQ ID NO: 912 - protein, 114 aa, synthetic construct
EVQLVESGVGSVQAGETLRLSCTASGFTFDDSDMGWYRQAPGDECELVSTISSDGSTNYADSVKGRFTISQDNAKNTVYLQMTSLKPEDTAIYSCRTMASRIGCWGQGTLVTVS

SEQ ID NO: 913 - protein, 114 aa, synthetic construct
EVQLVESSGGSVQAGETLRLSCTASGFTFDDSDMGWYRQAPGDECELVSTISSDGSTNYADSVKGRFTISQDNAKNTVYLQMTSLKPEDTAIYSCRTMASRIGCWGQGTLVTVS

SEQ ID NO: 914 - protein, 114 aa, synthetic construct
EVQLVESVGGSVQAGETLRLSCTASGFTFDDSDMGWYRQAPGDECELVSTISSDGSTNYADSVKGRFTISQDNAKNTVYLQMTSLKPEDTAIYSCRTMASRIGCWGQGTLVTVS

SEQ ID NO: 915 - protein, 114 aa, synthetic construct
EVQLVGSGGGSVQAGETLRLSCTASGFTFDDSDMGWYRQAPGDECELVSTISSDGSTNYADSVKGRFTISQDNAKNTVYLQMTSLKPEDTAIYSCRTMASRIGCWGQGTLVTVS

SEQ ID NO: 916 - protein, 114 aa, synthetic construct
EVQLVKSGGGSVQAGETLRLSCTASGFTFDDSDMGWYRQAPGDECELVSTISSDGSTNYADSVKGRFTISQDNAKNTVYLQMTSLKPEDTAIYSCRTMASRIGCWGQGTLVTVS

SEQ ID NO: 917 - protein, 114 aa, synthetic construct
EVQLVVSGGGSVQAGETLRLSCTASGFTFDDSDMGWYRQAPGDECELVSTISSDGSTNYADSVKGRFTISQDNAKNTVYLQMTSLKPEDTAIYSCRTMASRIGCWGQGTLVTVS

SEQ ID NO: 918 - protein, 114 aa, synthetic construct
EVQPVESGGGSVQAGETLRLSCTASGFTFDDSDMGWYRQAPGDECELVSTISSDGSTNYADSVKGRFTISQDNAKNTVYLQMTSLKPEDTAIYSCRTMASRIGCWGQGTLVTVS

SEQ ID NO: 919 - protein, 114 aa, synthetic construct
EVRLVESGGGSVQAGETLRLSCTASGFTFDDSDMGWYRQAPGDECELVSTISSDGSTNYADSVKGRFTISQDNAKNTVYLQMTSLKPEDTAIYSCRTMASRIGCWGQGTLVTVS

SEQ ID NO: 920 - protein, 111 aa, synthetic construct
LVESGGGSVQAGETLRLSCTASGFTFDDSDMGWYRQAPGDECELVSTISSDGSTNYADSVKGRFTISQDNAKNTVYLQMTSLKPEDTAIYSCRTMASRIGCWGQGTLVTVS

SEQ ID NO: 921 - protein, 110 aa, synthetic construct
VESGGGSVQAGETLRLSCTASGFTFDDSDMGWYRQAPGDECELVSTISSDGSTNYADSVKGRFTISQDNAKNTVYLQMTSLKPEDTAIYSCRTMASRIGCWGQGTLVTVS

SEQ ID NO: 922 - protein, 113 aa, synthetic construct
VKLEESGGGSVQAGESLRLSCTAPGFTFDDSDMGWYRQAPGDECELVSTISSDGSTNYADSVKGRFTISQDNAKNTVYLQMTSLKPEDTAIYSCRTMASRIGCWGQGTLVTVS

SEQ ID NO: 923 - protein, 113 aa, synthetic construct
VKLEESGGGSVQAGESLRLSCTAPGFTSNSCGMDWYRQAPGDECELVSTISSDGSTNYADSVKGRFTISQDNAKNTVYLQMTSLKPEDTAIYSCRTMASRIGCWGQGTLVTVS

SEQ ID NO: 924 - protein, 113 aa, synthetic construct
VKLEESGGGSVQAGETLRLSCTASGFTFDDSDMGWYRQAPGDECELVSTISSDGSTNYADSVKGRFTISQDNAKNTVYLQMTSLKPEDTAIYSCRTMASRIGCWGQGTLVTVS

SEQ ID NO: 925 - protein, 113 aa, synthetic construct
VKLVESGGGSVQAGETLRLSCTASGFTFDDSDMGWYRQAPGDECELVSTISSDGSTNYADSVKGRFTISQDNAKNTVYLQMTSLKPEDTAIYSCRTMASRIGCWGQGTLVTVS

SEQ ID NO: 926 - protein, 113 aa, synthetic construct
VQLVESGGGLVQAGETLRLSCTASGFTFDDSDMGWYRQAPGDECELVSTISSDGSTNYADSVKGRFTISQDNAKNTVYLQMTSLKPEDTAIYSCRTMASRIGCWGQGTLVTVS

SEQ ID NO: 927 - protein, 113 aa, synthetic construct
VQLVESGGGLVQAGGSLRLSCAASGRTFSSYNMGWHRQAPGDECELVSTISSDGSTNYADSVKGRFTISQDNAKNTVYLQMTSLKPEDTAIYSCRTMASRIGCWGQGTLVTVS

SEQ ID NO: 928 - protein, 113 aa, synthetic construct
VQLVESGGGLVQAGGSLRLSCAASGRTFSSYNMGWHRQAPGKERELVAVISSDGSTNYADSVKGRFTISQDNAKNTVYLQMTSLKPEDTAIYSCRTMASRIGCWGQGTLVTVS

SEQ ID NO: 929 - protein, 113 aa, synthetic construct
VQLVESGGGLVQAGGSLRLSCAASGRTFSSYNMGWHRQAPGKERELVSTISSDGSTNYADSVKGRFTISQDNAKNTVYLQMTSLKPEDTAIYSCRTMASRIGCWGQGTLVTVS

SEQ ID NO: 930 - protein, 113 aa, synthetic construct
VQLVESGGGLVQAGGSLRLSCAASGRTFSSYNMGWYRQAPGDECELVSTISSDGSTNYADSVKGRFTISQDNAKNTVYLQMTSLKPEDTAIYSCRTMASRIGCWGQGTLVTVS

SEQ ID NO: 931 - protein, 113 aa, synthetic construct
VQLVESGGGLVQAGGSLRLSCAASGRTSSSFGMGWHRQAPGDECELVSTISSDGSTNYADSVKGRFTISQDNAKNTVYLQMTSLKPEDTAIYSCRTMASRIGCWGQGTLVTVS

SEQ ID NO: 932 - protein, 113 aa, synthetic construct
VQLVESGGGLVQAGGSLRLSCTASGFTFDDSDMGWYRQAPGDECELVSTISSDGSTNYADSVKGRFTISQDNAKNTVYLQMTSLKPEDTAIYSCRTMASRIGCWGQGTLVTVS

SEQ ID NO: 933 - protein, 113 aa, synthetic construct
VQLVESGGGLVQPGGSLRLSCAASGSMFSINAVAWYRQAPGDECELVSTISSDGSTNYADSVKGRFTISQDNAKNTVYLQMTSLKPEDTAIYSCRTMASRIGCWGQGTLVTVS

SEQ ID NO: 934 - protein, 113 aa, synthetic construct
VQLVESGGGLVQPGGSLRLSCAASGSMFSINAVGWYRQAPGDECELVSTISSDGSTNYADSVKGRFTISQDNAKNTVYLQMTSLKPEDTAIYSCRTMASRIGCWGQGTLVTVS

SEQ ID NO: 935 - protein, 113 aa, synthetic construct
VQLVESGGGLVQPGGSLRLSCTASGFTFDDSDMGWYRQAPGDECELVSTISSDGSTNYADSVKGRFTISQDNAKNTVYLQMTSLKPEDTAIYSCRTMASRIGCWGQGTLVTVS

SEQ ID NO: 936 - protein, 113 aa, synthetic construct
VQLVESGGGSVQAGETLRLSCTASGFTFDDSDIGWYRQAPGDECELVSTISSDGSTNYADSVKGRFTISQDNAKNTVYLQMTSLKPEDTAIYSCRTMASRIGCWGQGTLVTVS

SEQ ID NO: 937 - protein, 113 aa, synthetic construct
VQLVESGGGSVQAGETLRLSCTASGFTFDDSDMGWYRQAPGDECELLSTISSDGSTNYADSVKGRFTISQDNAKNTVYLQMTSLKPEDTAIYSCRTMASRIGCWGQGTLVTVS

SEQ ID NO: 938 - protein, 113 aa, synthetic construct
VQLVESGGGSVQAGETLRLSCTASGFTFDDSDMGWYRQAPGDECELVSTISSDGSTNYADSVKGRFTISQDNAKNTVYLQMTSLKPEDTAIYSCRTMASRIGCWGQGTLVTVS

SEQ ID NO: 939 - protein, 112 aa, synthetic construct
VQLVESGGSVQAGETLRLSCTASGFTFDDSDMGWYRQAPGDECELVSTISSDGSTNYADSVKGRFTISQDNAKNTVYLQMTSLKPEDTAIYSCRTMASRIGCWGQGTLVTVS

SEQ ID NO: 940 - protein, 116 aa, synthetic construct
DVQLVESGGGLVQAGGSLRLSCAASGFTLDFYAIGWFRQAPGKEREGVSSISSSGGSTNYADSVKGRFTVSRDNAKHTVYLQMNSLKPEDTAVYYCAGVGDYGRRAMGQGTSVTVS

SEQ ID NO: 941 - protein, 116 aa, synthetic construct
DVQLVESGGGLVQAGGSLRLSCAASGFTLDNYAIGWFRQAPGKEREGVSSISSSGGSTNYADSVKGRFTVSRDNAKHTVYLQMNSLKPEDTAVYYCAGVGDYGRRAMGQGTSVTVS

SEQ ID NO: 942 - protein, 116 aa, synthetic construct
DVQLVESGGGLVQAGGSLRLSCAASGFTLDNYAIGWFRQAPGKEREGVSSISSSGGSTNYADSVKGRFTVSRDNAKQTVYLQMNSLKPEDTAVYYCAGVGDYGRRAMGQGTSVTVS

SEQ ID NO: 943 - protein, 111 aa, synthetic construct
ESGGGLVQPGGSLRLSCAASGFTLDNYAIGWFRQAPGKEREGVSSISSSGGSTNYADSVKGRFTVSRDNAKHTVYLQMNSLKPEDTAVYYCAGVGDYGRRAMGQGTSVTVS

SEQ ID NO: 944 - protein, 116 aa, synthetic construct
EVQLVESGGGSVQAGETLRLSCTASGFTFDDSDMGWYRQAPGKEREGVSSISSSGGSTNYADSVKGRFTVSRDNAKHTVYLQMNSLKPEDTAVYYCAGVGDYGRRAMGQGTSVTVS

SEQ ID NO: 945 - protein, 109 aa, synthetic construct
GGGLVQPGGSLRLSCAASGFTLDNYAIGWFRQAPGKEREGVSSISSSGGSTNYADSVKGRFTVSRDNAKHTVYLQMNSLKPEDTAVYYCAGVGDYGRRAMGQGTSVTVS

SEQ ID NO: 946 - protein, 109 aa, synthetic construct
GGGLVQPGGSLRLTCAASGFTLDNYAIGWFRQAPGKEREGVSSISSSGGSTNYADSVKGRFTVSRDNAKHTVYLQMNSLKPEDTAVYYCAGVGDYGRRAMGQGTSVTVS

SEQ ID NO: 947 - protein, 114 aa, synthetic construct
KLVESGGGLVQPGGSLRLSCAASGFTLDNYAIGWFRQAPGKEREGVSSISSSGGSTNYADSVKGRFTVSRDNAKHTVYLQMNSLKPEDTAVYYCAGVGDYGRRAMGQGTSVTVS

SEQ ID NO: 948 - protein, 115 aa, synthetic construct
LHLVESGGGLVQPGGSLRLSCAASGFTLDNYAIGWFRQAPGKEREGVSSISSSGGSTNYADSVKGRFTVSRDNAKHTVYLQMNSLKPEDTAVYYCAGVGDYGRRAMGQGTSVTVS

SEQ ID NO: 949 - protein, 115 aa, synthetic construct
LHLVESGGGLVQPGGSLRLSCAASGFTLDNYAIGWFRQAPGKEREGVSSISSSGGSTNYADSVKGRFTVSRDNAKQTVYLQMNSLKPEDTAVYYCAGVGDYGRRAMGQGTSVTVS

SEQ ID NO: 950 - protein, 115 aa, synthetic construct
LHLVESGGGLVQPGGSLRLTCAASGFTLDNYAIGWFRQAPGKEREGVSSISSSGGSTNYADSVKGRFTVSRDNAKHTVYLQMNSLKPEDTAVYYCAGVGDYGRRAMGQGTSVTVS

SEQ ID NO: 951 - protein, 115 aa, synthetic construct
LHLVESGGGLVQPGGSLRLTCAASGFTLDNYAIGWFRQAPGKEREGVSSISSSGGSTNYADSVKGRFTVSRDNAKQTVYLQMNSLKPEDTAVYYCAGVGDYGRRAMGQGTSVTVS

SEQ ID NO: 952 - protein, 115 aa, synthetic construct
LQLEESGGGLVQPGGSLRLSCAASGFTLDNYAIGWFRQAPGKEREGVSSISSSGGSTNYADSVKGRFTVSRDNAKHTVYLQMNSLKPEDTAVYYCAGVGDYGRRAMGQGTSVTVS

SEQ ID NO: 953 - protein, 115 aa, synthetic construct
LQLVERGGGLVQPGGSLRLSCAASGFTLDNYAIGWFRQAPGKEREGVSSISSSGGSTNYADSVKGRFTVSRDNAKHTVYLQMNSLKPEDTAVYYCAGVGDYGRRAMGQGTSVTVS

SEQ ID NO: 954 - protein, 115 aa, synthetic construct
LQLVESCGGLVQPGGSLRLSCAASGFTLDNYAIGWFRQAPGKEREGVSSISSSGGSTNYADSVKGRFTVSRDNAKHTVYLQMNSLKPEDTAVYYCAGVGDYGRRAMGQGTSVTVS

SEQ ID NO: 955 - protein, 115 aa, synthetic construct
LQLVESGGGLAQPGGSLRLSCAASGFTLDNYAIGWFRQAPGKEREGVSSISSSGGSTNYADSVKGRFTVSRDNAKHTVYLQMNSLKPEDTAVYYCAGVGDYGRRAMGQGTSVTVS

SEQ ID NO: 956 - protein, 115 aa, synthetic construct
LQLVESGGGLIQPGGSLRLSCAASGFTLDNYAIGWFRQAPGKEREGVSSISSSGGSTNYADSVKGRFTVSRDNAKHTVYLQMNSLKPEDTAVYYCAGVGDYGRRAMGQGTSVTVS

SEQ ID NO: 957 - protein, 115 aa, synthetic construct
LQLVESGGGLVHPGGSLRLTCAASGFTLDNYAIGWFRQAPGKEREGVSSISSSGGSTNYADSVKGRFTVSRDNAKHTVYLQMNSLKPEDTAVYYCAAVGDYGRRAMGQGTSVTVS

SEQ ID NO: 958 - protein, 115 aa, synthetic construct
LQLVESGGGLVQHGGSLRLSCAASGFTLDNYAIGWFRQAPGKEREGVSSISSSGGSTNYADSVKGRFTVSRDNAKQTVYLQMNSLKPEDTAVYYCAGVGDYGRRAMGQGTSVTVS

SEQ ID NO: 959 - protein, 115 aa, synthetic construct
LQLVESGGGLVQPGGALRLSCAASGFTLDNYAIGWFRQAPGKEREGVSSISSSGGSTNYADSVKGRFTVSRDNAKHTVYLQMNSLKPEDTAVYYCAGVGDYGRRAMGQGTSVTVS

SEQ ID NO: 960 - protein, 115 aa, synthetic construct
LQLVESGGGLVQPGGPLRLSCAASGFTLDNYAIGWFRQAPGKEREGVSSISSSGGSTNYADSVKGRFTVSRDNAKHTVYLQMNSLKPEDTAVYYCAGVGDYGRRAMGQGTSVTVS

SEQ ID NO: 961 - protein, 115 aa, synthetic construct
LQLVESGGGLVQPGGSLGLSCAASGFTLDNYAIGWFRQAPGKEREGVSSISSSGGSTNYADSVKGRFTVSRDNAKHTVYLQMNSLKPEDTAVYYCAGVGDYGRRAMGQGTSVTVS

SEQ ID NO: 962 - protein, 115 aa, synthetic construct
LQLVESGGGLVQPGGSLRLSCAARGFTLDNYAIGWFRQAPGKEREGVSSISSSGGSTNYADSVKGRFTVSRDNAKHTVYLQMNSLKPEDTAVYYCAGVGDYGRRAMGQGTSVTVS

SEQ ID NO: 963 - protein, 115 aa, synthetic construct
LQLVESGGGLVQPGGSLRLSCAASGCTLDNYAIGWFRQAPGKEREGVSSISSSGGSTNYADSVKGRFTVSRDNAKHTVYLQMNSLKPEDTAVYYCAGVGDYGRRAMGQGTSVTVS

SEQ ID NO: 964 - protein, 115 aa, synthetic construct
LQLVESGGGLVQPGGSLRLSCAASGCTLDNYAIGWFRQAPGKEREGVSSISSSGGSTNYADSVKGRFTVSRDNAKQTVYLQMNSLKPEDTAVYYCAGVGDYGRRAMGQGTSVTVS

SEQ ID NO: 965 - protein, 115 aa, synthetic construct
LQLVESGGGLVQPGGSLRLSCAASGFALDNYAIGWFRQAPGKEREGVSSISSSGGSTNYADSVKGRFTVSRDNAKHTVYLQMNSLKPEDTAVYYCAGVGDYGRRAMGQGTSVTVS

SEQ ID NO: 966 - protein, 115 aa, synthetic construct
LQLVESGGGLVQPGGSLRLSCAASGFALDSYAIGWFRQAPGKEREGVSSISSSGGSTNYADSVKGRFTVSRDNAKHTVYLQMNSLKPEDTAVYYCAGVGDYGRRAMGQGTSVTVS

SEQ ID NO: 967 - protein, 115 aa, synthetic construct
LQLVESGGGLVQPGGSLRLSCAASGFSLDNYAIGWFRQAPGKEREGVSSISSSGGSTNYADSVKGRFTVSRDNAKHTVYLQMNSLKPEDTAVYYCAGVGDYGRRAMGQGTSVTVS

SEQ ID NO: 968 - protein, 115 aa, synthetic construct
LQLVESGGGLVQPGGSLRLSCAASGFSLDNYAIGWFRQAPGKEREGVSSISSSGGSTNYADSVKGRFTVSRDNAKQTVYLQMNSLKPEDTAVYYCAGVGDYGRRAMGQGTSVTVS

SEQ ID NO: 969 - protein, 115 aa, synthetic construct
LQLVESGGGLVQPGGSLRLSCAASGFSLDSYAIGWFRQAPGKEREGVSCISSSGGSTNYADSVKGRFTVSRDNAKHTVYLQMNSLKPEDTAVYYCAGVGDYGRRAMGQGTSVTVS

SEQ ID NO: 970 - protein, 115 aa, synthetic construct
LQLVESGGGLVQPGGSLRLSCAASGFSLDSYAIGWFRQAPGKEREGVSSISSSGGSTNYADSVKGRFTVSRDNAKHTVYLQMNSLKPEDTAVYYCAAVGDYGRRAMGQGTSVTVS

SEQ ID NO: 971 - protein, 115 aa, synthetic construct
LQLVESGGGLVQPGGSLRLSCAASGFSLDSYAIGWFRQAPGKEREGVSSISSSGGSTNYADSVKGRFTVSRDNAKHTVYLQMNSLKPEDTAVYYCAGVGDYGRRAMGQGTSVTVS

SEQ ID NO: 972 - protein, 115 aa, synthetic construct
LQLVESGGGLVQPGGSLRLSCAASGFSLDSYAIGWFRQAPGKEREGVSSISSSGGSTNYADSVKGRFTVSRDNAKNTVYLQMNSLKPEDTAVYYCAGVGDYGRRAMGQGTSVTVS

SEQ ID NO: 973 - protein, 115 aa, synthetic construct
LQLVESGGGLVQPGGSLRLSCAASGFSLDSYAIGWFRQAPGKEREGVSSISSSGGSTNYADSVKGRFTVSRDNAKQTVYLQMNSLKPEDTAVYYCAGVGDYGRRAMGQGTSVTVS

SEQ ID NO: 974 - protein, 115 aa, synthetic construct
LQLVESGGGLVQPGGSLRLSCAASGFSLDSYAIGWFRQAPGQEREGVSCISSSGGSTNYADSVKGRFTVSRDNAKHTVYLQMNSLKPEDTAVYYCAGVGDYGRRAMGQGTSVTVS

SEQ ID NO: 975 - protein, 115 aa, synthetic construct
LQLVESGGGLVQPGGSLRLSCAASGFSLDSYAIGWFRQAPGQEREGVSSISSSGGSTNYADSVKGRFTISRDYAKNTVYLQMDSLKPEDTAVYYCAGVGDYGRRAMGQGTSVTVS

SEQ ID NO: 976 - protein, 115 aa, synthetic construct
LQLVESGGGLVQPGGSLRLSCAASGFSLDSYAIGWFRQAPGQEREGVSSISSSGGSTNYADSVKGRFTVSRDNAKHTVYLQMNSLKPEDTAVYYCAAVGDYGRRAMGQGTSVTVS

SEQ ID NO: 977 - protein, 115 aa, synthetic construct
LQLVESGGGLVQPGGSLRLSCAASGFSLDSYAIGWFRQAPGQEREGVSSISSSGGSTNYADSVKGRFTVSRDNAKHTVYLQMNSLKPEDTAVYYCAGVGDYGRRAMGQGTSVTVS

SEQ ID NO: 978 - protein, 115 aa, synthetic construct
LQLVESGGGLVQPGGSLRLSCAASGFSLDSYAIGWFRQAPGQEREGVSSISSSGGSTNYADSVKGRFTVSRDNAKNTVYLQMNSLKPEDTAVYYCAAVGDYGRRAMGQGTSVTVS

SEQ ID NO: 979 - protein, 115 aa, synthetic construct
LQLVESGGGLVQPGGSLRLSCAASGFSLDSYAIGWFRQAPGQEREGVSSISSSGGSTNYADSVKGRFTVSRDNAKNTVYLQMNSLKPEDTAVYYCAGVGDYGRRAMGQGTSVTVS

SEQ ID NO: 980 - protein, 115 aa, synthetic construct
LQLVESGGGLVQPGGSLRLSCAASGFSLDSYAIGWFRQAPGQEREGVSSISSSGGSTNYADSVKGRFTVSRDNAKQTVYLQMNSLKPEDTAVYYCAGVGDYGRRAMGQGTSVTVS

SEQ ID NO: 981 - protein, 115 aa, synthetic construct
LQLVESGGGLVQPGGSLRLSCAASGFSLDSYAIGWFRQAPGTEREGVSSISSSGGSTNYADSVKGRFTVSRDNAKHTVYLQMNSLKPEDTAVYYCAGVGDYGRRAMGQGTSVTVS

SEQ ID NO: 982 - protein, 115 aa, synthetic construct
LQLVESGGGLVQPGGSLRLSCAASGFSLDSYAIGWFRQAPGTEREGVSSISSSGGSTNYADSVKGRFTVSRDNAKQTVYLQMNSLKPEDTAVYYCAGVGDYGRRAMGQGTSVTVS

SEQ ID NO: 983 - protein, 115 aa, synthetic construct
LQLVESGGGLVQPGGSLRLSCAASGFTLDFYAIGWFRQAPGKEREGVSCISSSGGSTNYADSVKGRFTVSRDNAKHTVYLQMNSLKPEDTAVYYCAGVGDYGRRAMGQGTSVTVS

SEQ ID NO: 984 - protein, 115 aa, synthetic construct
LQLVESGGGLVQPGGSLRLSCAASGFTLDFYAIGWFRQAPGKEREGVSCISSSGGSTNYADSVKGRFTVSRDNAKQTVYLQMNSLKPEDTAVYYCAGVGDYGRRAMGQGTSVTVS

SEQ ID NO: 985 - protein, 115 aa, synthetic construct
LQLVESGGGLVQPGGSLRLSCAASGFTLDFYAIGWFRQAPGKEREGVSSISSSGGSTNYADSVKGRFTVSRDNAKHTVYLQMNSLKPEDTAVYYCAAVGDYGRRAMGQGTSVTVS

SEQ ID NO: 986 - protein, 115 aa, synthetic construct
LQLVESGGGLVQPGGSLRLSCAASGFTLDFYAIGWFRQAPGKEREGVSSISSSGGSTNYADSVKGRFTVSRDNAKHTVYLQMNSLKPEDTAVYYCAGVGDYGRRAMGQGTSVTVS

SEQ ID NO: 987 - protein, 115 aa, synthetic construct
LQLVESGGGLVQPGGSLRLSCAASGFTLDFYAIGWFRQAPGKEREGVSSISSSGGSTNYADSVKGRFTVSRDNAKNTVYLQMNSLKPEDTAVYYCAAVGDYGRRAMGQGTSVTVS

SEQ ID NO: 988 - protein, 115 aa, synthetic construct
LQLVESGGGLVQPGGSLRLSCAASGFTLDFYAIGWFRQAPGKEREGVSSISSSGGSTNYADSVKGRFTVSRDNAKQTVYLQMNSLKPEDTAVYYCAGVGDYGRRAMGQGTSVTVS

SEQ ID NO: 989 - protein, 115 aa, synthetic construct
LQLVESGGGLVQPGGSLRLSCAASGFTLDNYAIGWFRHAPGKEREGVSSISSSGGSTNYADSVKGRFTVSRDNAKHTVYLQMNSLKPEDTAVYYCAGVGDYGRRAMGQGTSVTVS

SEQ ID NO: 990 - protein, 115 aa, synthetic construct
LQLVESGGGLVQPGGSLRLSCAASGFTLDNYAIGWFRQAPEKEREGVSSISSSGGSTNYADSVKGRFTVSRDNAKHTVYLQMNSLKPEDTAVYYCAGVGDYGRRAMGQGTSVTVS

SEQ ID NO: 991 - protein, 115 aa, synthetic construct
LQLVESGGGLVQPGGSLRLSCAASGFTLDNYAIGWFRQAPGKEREEVSSISSSGGSTNYADSVKGRFTVSRDNAKHTVYLQMNSLKPEDTAVYYCAGVGDYGRRAMGQGTSVTVS

SEQ ID NO: 992 - protein, 115 aa, synthetic construct
LQLVESGGGLVQPGGSLRLSCAASGFTLDNYAIGWFRQAPGKEREGVSCISSSGGSTHYADSVKGRFTVSRDNAKQTVYLQMNSLKPEDTAVYYCAGVGDYGRRAMGQGTSVTVS

SEQ ID NO: 993 - protein, 115 aa, synthetic construct
LQLVESGGGLVQPGGSLRLSCAASGFTLDNYAIGWFRQAPGKEREGVSCISSSGGSTNYADSVKGRFTVSRDNAKHTVYLQMNSLKPEDTAVYYCAAVGDYGRRAMGQGTSVTVS

SEQ ID NO: 994 - protein, 115 aa, synthetic construct
LQLVESGGGLVQPGGSLRLSCAASGFTLDNYAIGWFRQAPGKEREGVSCISSSGGSTNYADSVKGRFTVSRDNAKNTVYLQMNSLKPEDTAVYYCAGVGDYGRRAMGQGTSVTVS

SEQ ID NO: 995 - protein, 115 aa, synthetic construct
LQLVESGGGLVQPGGSLRLSCAASGFTLDNYAIGWFRQAPGKEREGVSCISSSGGSTNYADSVKGRFTVSRDNAKQTVYLQMNSLKPEDTAVYYCAGVGDYGRRAMGQGTSVTVS

SEQ ID NO: 996 - protein, 115 aa, synthetic construct
LQLVESGGGLVQPGGSLRLSCAASGFTLDNYAIGWFRQAPGKEREGVSSISSPGGSTNYADSVKGRFTVSRDNAKHTVYLQMNSLKPEDTAVYYCAGVGDYGRRAMGQGTSVTVS

SEQ ID NO: 997 - protein, 115 aa, synthetic construct
LQLVESGGGLVQPGGSLRLSCAASGFTLDNYAIGWFRQAPGKEREGVSSISSSCGSTNYADSVKGRFTVSRDNAKHTVYLQMNSLKPEDTAVYYCAGVGDYGRRAMGQGTSVTVS

SEQ ID NO: 998 - protein, 115 aa, synthetic construct
LQLVESGGGLVQPGGSLRLSCAASGFTLDNYAIGWFRQAPGKEREGVSSISSSGDSTHYADSVKGRFTISRDNAKHTVYLQMNSLKPEDTAVYYCAGVGDYGRRAMGQGTSVTVS

SEQ ID NO: 999 - protein, 115 aa, synthetic construct
LQLVESGGGLVQPGGSLRLSCAASGFTLDNYAIGWFRQAPGKEREGVSSISSSGDSTHYADSVKGRFTVSRDNAKHTVYLQMNSLKPEDTAVYYCAGVGDYGRRAMGQGTSVTVS

SEQ ID NO: 1000 - protein, 115 aa, synthetic construct
LQLVESGGGLVQPGGSLRLSCAASGFTLDNYAIGWFRQAPGKEREGVSSISSSGDSTNYADSVKGRFTVSRDNAKHTVYLQMNSLKPEDTAVYYCAGVGDYGRRAMGQGTSVTVS

SEQ ID NO: 1001 - protein, 115 aa, synthetic construct
LQLVESGGGLVQPGGSLRLSCAASGFTLDNYAIGWFRQAPGKEREGVSSISSSGGPTNYADSVKGRFTVSRDNAKHTVYLQMNSLKPEDTAVYYCAGVGDYGRRAMGQGTSVTVS

SEQ ID NO: 1002 - protein, 115 aa, synthetic construct
LQLVESGGGLVQPGGSLRLSCAASGFTLDNYAIGWFRQAPGKEREGVSSISSSGGSTDYADSVKGRFTVSRDNAKHTVYLQMNSLKPEDTAVYYCAGVGDYGRRAMGQGTSVTVS

SEQ ID NO: 1003 - protein, 115 aa, synthetic construct
LQLVESGGGLVQPGGSLRLSCAASGFTLDNYAIGWFRQAPGKEREGVSSISSSGGSTHYADSVKGRFTISRDNAKHTVYLQMNSLKPEDTAVYYCAGVGDYGRRAMGQGTSVTVS

SEQ ID NO: 1004 - protein, 115 aa, synthetic construct
LQLVESGGGLVQPGGSLRLSCAASGFTLDNYAIGWFRQAPGKEREGVSSISSSGGSTHYADSVKGRFTISRDNAKNTVYLQMNSLKPEDTAVYYCAGVGDYGRRAMGQGTSVTVS

SEQ ID NO: 1005 - protein, 115 aa, synthetic construct
LQLVESGGGLVQPGGSLRLSCAASGFTLDNYAIGWFRQAPGKEREGVSSISSSGGSTHYADSVKGRFTVSRDNAKHTVYLQMNSLKPEDTAVYYCAGVGDYGRRAMGQGTSVTVS

SEQ ID NO: 1006 - protein, 115 aa, synthetic construct
LQLVESGGGLVQPGGSLRLSCAASGFTLDNYAIGWFRQAPGKEREGVSSISSSGGSTIYADSVKGRFTISRDNAKHTVYLQMNSLKPEDTAVYYCAGVGDYGRRAMGQGTSVTVS

SEQ ID NO: 1007 - protein, 115 aa, synthetic construct
LQLVESGGGLVQPGGSLRLSCAASGFTLDNYAIGWFRQAPGKEREGVSSISSSGGSTIYADSVKGRFTISRDNAKQTVYLQMNSLKPEDTAVYYCAGVGDYGRRAMGQGTSVTVS

SEQ ID NO: 1008 - protein, 115 aa, synthetic construct
LQLVESGGGLVQPGGSLRLSCAASGFTLDNYAIGWFRQAPGKEREGVSSISSSGGSTIYADSVKGRFTISRDYAKNTVYLQMNSLKPEDTAVYYCAGVGDYGRRAMGQGTSVTVS

SEQ ID NO: 1009 - protein, 115 aa, synthetic construct
LQLVESGGGLVQPGGSLRLSCAASGFTLDNYAIGWFRQAPGKEREGVSSISSSGGSTIYADSVKGRFTVSRDNAKHTVYLQMNSLKPEDTAVYYCAGVGDYGRRAMGQGTSVTVS

SEQ ID NO: 1010 - protein, 115 aa, synthetic construct
LQLVESGGGLVQPGGSLRLSCAASGFTLDNYAIGWFRQAPGKEREGVSSISSSGGSTIYADSVKGRFTVSRDNAKQTVYLQMNSLKPEDTAVYYCAGVGDYGRRAMGQGTSVTVS

SEQ ID NO: 1011 - protein, 115 aa, synthetic construct
LQLVESGGGLVQPGGSLRLSCAASGFTLDNYAIGWFRQAPGKEREGVSSISSSGGSTNYADSAKGRFTVSRDNAKHTVYLQMNSLKPEDTAVYYCAGVGDYGRRAMGQGTSVTVS

SEQ ID NO: 1012 - protein, 115 aa, synthetic construct
LQLVESGGGLVQPGGSLRLSCAASGFTLDNYAIGWFRQAPGKEREGVSSISSSGGSTNYADSVKARFTVSRDNAKHTVYLQMNSLKPEDTAVYYCAGVGDYGRRAMGQGTSVTVS

SEQ ID NO: 1013 - protein, 115 aa, synthetic construct
LQLVESGGGLVQPGGSLRLSCAASGFTLDNYAIGWFRQAPGKEREGVSSISSSGGSTNYADSVKGRFAVSRDNAKHTVYLQMNSLKPEDTAVYYCAGVGDYGRRAMGQGTSVTVS

SEQ ID NO: 1014 - protein, 115 aa, synthetic construct
LQLVESGGGLVQPGGSLRLSCAASGFTLDNYAIGWFRQAPGKEREGVSSISSSGGSTNYADSVKGRFSISRDNAKHTVYLQMNSLKPEDTAVYYCAGVGDYGRRAMGQGTSVTVS

SEQ ID NO: 1015 - protein, 115 aa, synthetic construct
LQLVESGGGLVQPGGSLRLSCAASGFTLDNYAIGWFRQAPGKEREGVSSISSSGGSTNYADSVKGRFSISRDNAKNTVYLQMNSLKPEDTAVYYCAGVGDYGRRAMGQGTSVTVS

SEQ ID NO: 1016 - protein, 115 aa, synthetic construct
LQLVESGGGLVQPGGSLRLSCAASGFTLDNYAIGWFRQAPGKEREGVSSISSSGGSTNYADSVKGRFSISRDNAKQTVYLQMNSLKPEDTAVYYCAGVGDYGRRAMGQGTSVTVS

SEQ ID NO: 1017 - protein, 115 aa, synthetic construct
LQLVESGGGLVQPGGSLRLSCAASGFTLDNYAIGWFRQAPGKEREGVSSISSSGGSTNYADSVKGRFTISRDNAKHTVYLQMNSLKPEDTAVYYCAAVGDYGRRAMGQGTSVTVS

SEQ ID NO: 1018 - protein, 115 aa, synthetic construct
LQLVESGGGLVQPGGSLRLSCAASGFTLDNYAIGWFRQAPGKEREGVSSISSSGGSTNYADSVKGRFTISRDNAKHTVYLQMNSLKPEDTAVYYCAGVGDYGRRAMGQGTSVTVS

SEQ ID NO: 1019 - protein, 115 aa, synthetic construct
LQLVESGGGLVQPGGSLRLSCAASGFTLDNYAIGWFRQAPGKEREGVSSISSSGGSTNYADSVKGRFTISRDNAKNTVYLHMNSLKPEDTAVYYCAGVGDYGRRAMGQGTSVTVS

SEQ ID NO: 1020 - protein, 115 aa, synthetic construct
LQLVESGGGLVQPGGSLRLSCAASGFTLDNYAIGWFRQAPGKEREGVSSISSSGGSTNYADSVKGRFTISRDNAKNTVYLQMNSLKPEDTAVYYCAADGDYGRRAMGQGTSVTVS

SEQ ID NO: 1021 - protein, 115 aa, synthetic construct
LQLVESGGGLVQPGGSLRLSCAASGFTLDNYAIGWFRQAPGKEREGVSSISSSGGSTNYADSVKGRFTISRDNAKNTVYLQMNSLKPEDTAVYYCAAVGDYGRRAMGQGTSVTVS

SEQ ID NO: 1022 - protein, 115 aa, synthetic construct
LQLVESGGGLVQPGGSLRLSCAASGFTLDNYAIGWFRQAPGKEREGVSSISSSGGSTNYADSVKGRFTISRDNAKNTVYLQMNSLKPEDTAVYYCAGVGDYGRRAMGQGTSVTVS

SEQ ID NO: 1023 - protein, 115 aa, synthetic construct
LQLVESGGGLVQPGGSLRLSCAASGFTLDNYAIGWFRQAPGKEREGVSSISSSGGSTNYADSVKGRFTISRDNAKQTVYLQMNSLKPEDTAVYYCAGVGDYGRRAMGQGTSVTVS

SEQ ID NO: 1024 - protein, 115 aa, synthetic construct
LQLVESGGGLVQPGGSLRLSCAASGFTLDNYAIGWFRQAPGKEREGVSSISSSGGSTNYADSVKGRFTISRDYAKHTVYLQMNSLKPEDTAVYYCAGVGDYGRRAMGQGTSVTVS

SEQ ID NO: 1025 - protein, 115 aa, synthetic construct
LQLVESGGGLVQPGGSLRLSCAASGFTLDNYAIGWFRQAPGKEREGVSSISSSGGSTNYADSVKGRFTISRDYAKNTVYLQMDSLKPEDTAVYYCAADGDYGRRAMGQGTSVTVS

SEQ ID NO: 1026 - protein, 115 aa, synthetic construct
LQLVESGGGLVQPGGSLRLSCAASGFTLDNYAIGWFRQAPGKEREGVSSISSSGGSTNYADSVKGRFTISRDYAKNTVYLQMDSLKPEDTAVYYCAGVGDYGRRAMGQGTSVTVS

SEQ ID NO: 1027 - protein, 115 aa, synthetic construct
LQLVESGGGLVQPGGSLRLSCAASGFTLDNYAIGWFRQAPGKEREGVSSISSSGGSTNYADSVKGRFTISRDYAKNTVYLQMNSLKPEDTAVYYCAADGDYGRRAMGQGTSVTVS

SEQ ID NO: 1028 - protein, 115 aa, synthetic construct
LQLVESGGGLVQPGGSLRLSCAASGFTLDNYAIGWFRQAPGKEREGVSSISSSGGSTNYADSVKGRFTISRDYAKNTVYLQMNSLKPEDTAVYYCAGVGDYGRRAMGQGTSVTVS

SEQ ID NO: 1029 - protein, 115 aa, synthetic construct
LQLVESGGGLVQPGGSLRLSCAASGFTLDNYAIGWFRQAPGKEREGVSSISSSGGSTNYADSVKGRFTISRDYAKQTVYLQMNSLKPEDTAVYYCAGVGDYGRRAMGQGTSVTVS

SEQ ID NO: 1030 - protein, 115 aa, synthetic construct
LQLVESGGGLVQPGGSLRLSCAASGFTLDNYAIGWFRQAPGKEREGVSSISSSGGSTNYADSVKGRFTVSLDNAKQTVYLQMNSLKPEDTAVYYCAGVGDYGRRAMGQGTSVTVS

SEQ ID NO: 1031 - protein, 115 aa, synthetic construct
LQLVESGGGLVQPGGSLRLSCAASGFTLDNYAIGWFRQAPGKEREGVSSISSSGGSTNYADSVKGRFTVSRDNAKHTVCLQMNSLKPEDTAVYYCAGVGDYGRRAMGQGTSVTVS

SEQ ID NO: 1032 - protein, 115 aa, synthetic construct
LQLVESGGGLVQPGGSLRLSCAASGFTLDNYAIGWFRQAPGKEREGVSSISSSGGSTNYADSVKGRFTVSRDNAKHTVFLQMNSLKPEDTAVYYCAGVGDYGRRAMGQGTSVTVS

SEQ ID NO: 1033 - protein, 115 aa, synthetic construct
LQLVESGGGLVQPGGSLRLSCAASGFTLDNYAIGWFRQAPGKEREGVSSISSSGGSTNYADSVKGRFTVSRDNAKHTVSLQMNSLKPEDTAVYYCAGVGDYGRRAMGQGTSVTVS

SEQ ID NO: 1034 - protein, 115 aa, synthetic construct
LQLVESGGGLVQPGGSLRLSCAASGFTLDNYAIGWFRQAPGKEREGVSSISSSGGSTNYADSVKGRFTVSRDNAKHTVYLQINSLKPEDTAVYYCAGVGDYGRRAMGQGTSVTVS

SEQ ID NO: 1035 - protein, 115 aa, synthetic construct
LQLVESGGGLVQPGGSLRLSCAASGFTLDNYAIGWFRQAPGKEREGVSSISSSGGSTNYADSVKGRFTVSRDNAKHTVYLQMDSLKPEDTAVYYCAADGDYGRRAMGQGTSVTVS

SEQ ID NO: 1036 - protein, 115 aa, synthetic construct
LQLVESGGGLVQPGGSLRLSCAASGFTLDNYAIGWFRQAPGKEREGVSSISSSGGSTNYADSVKGRFTVSRDNAKHTVYLQMDSLKPEDTAVYYCAAVGDYGRRAMGQGTSVTVS

SEQ ID NO: 1037 - protein, 115 aa, synthetic construct
LQLVESGGGLVQPGGSLRLSCAASGFTLDNYAIGWFRQAPGKEREGVSSISSSGGSTNYADSVKGRFTVSRDNAKHTVYLQMDSLKPEDTAVYYCAGVGDYGRRAMGQGTSVTVS

SEQ ID NO: 1038 - protein, 115 aa, synthetic construct
LQLVESGGGLVQPGGSLRLSCAASGFTLDNYAIGWFRQAPGKEREGVSSISSSGGSTNYADSVKGRFTVSRDNAKHTVYLQMNRLKPEDTAVYYCAGVGDYGRRAMGQGTSVTVS

SEQ ID NO: 1039 - protein, 115 aa, synthetic construct
LQLVESGGGLVQPGGSLRLSCAASGFTLDNYAIGWFRQAPGKEREGVSSISSSGGSTNYADSVKGRFTVSRDNAKHTVYLQMNSLEPEDTAVYYCAGVGDYGRRAMGQGTSVTVS

SEQ ID NO: 1040 - protein, 115 aa, synthetic construct
LQLVESGGGLVQPGGSLRLSCAASGFTLDNYAIGWFRQAPGKEREGVSSISSSGGSTNYADSVKGRFTVSRDNAKHTVYLQMNSLKPEDTAIYYCAGVGDYGRRAMGQGTSVTVS

SEQ ID NO: 1041 - protein, 115 aa, synthetic construct
LQLVESGGGLVQPGGSLRLSCAASGFTLDNYAIGWFRQAPGKEREGVSSISSSGGSTNYADSVKGRFTVSRDNAKHTVYLQMNSLKPEDTAVCYCAGVGDYGRRAMGQGTSVTVS

SEQ ID NO: 1042 - protein, 115 aa, synthetic construct
LQLVESGGGLVQPGGSLRLSCAASGFTLDNYAIGWFRQAPGKEREGVSSISSSGGSTNYADSVKGRFTVSRDNAKHTVYLQMNSLKPEDTAVHYCAGVGDYGRRAMGQGTSVTVS

SEQ ID NO: 1043 - protein, 115 aa, synthetic construct
LQLVESGGGLVQPGGSLRLSCAASGFTLDNYAIGWFRQAPGKEREGVSSISSSGGSTNYADSVKGRFTVSRDNAKHTVYLQMNSLKPEDTAVYSCAGVGDYGRRAMGQGTSVTVS

SEQ ID NO: 1044 - protein, 115 aa, synthetic construct
LQLVESGGGLVQPGGSLRLSCAASGFTLDNYAIGWFRQAPGKEREGVSSISSSGGSTNYADSVKGRFTVSRDNAKHTVYLQMNSLKPEDTAVYYCAADGDYGRRAMGQGTSVTVS

SEQ ID NO: 1045 - protein, 116 aa, synthetic construct
LQLVESGGGLVQPGGSLRLSCAASGFTLDNYAIGWFRQAPGKEREGVSSISSSGGSTNYADSVKGRFTVSRDNAKHTVYLQMNSLKPEDTAVYYCAAEDFGNSKTYWGQGTLVTVS

SEQ ID NO: 1046 - protein, 115 aa, synthetic construct
LQLVESGGGLVQPGGSLRLSCAASGFTLDNYAIGWFRQAPGKEREGVSSISSSGGSTNYADSVKGRFTVSRDNAKHTVYLQMNSLKPEDTAVYYCAAVGDYGRRAMGQGTSVTVS

SEQ ID NO: 1047 - protein, 115 aa, synthetic construct
LQLVESGGGLVQPGGSLRLSCAASGFTLDNYAIGWFRQAPGKEREGVSSISSSGGSTNYADSVKGRFTVSRDNAKHTVYLQMNSLKPEDTAVYYCAGFGDYGRRAMGQGTSVTVS

SEQ ID NO: 1048 - protein, 115 aa, synthetic construct
LQLVESGGGLVQPGGSLRLSCAASGFTLDNYAIGWFRQAPGKEREGVSSISSSGGSTNYADSVKGRFTVSRDNAKHTVYLQMNSLKPEDTAVYYCAGVEDYGRRAMGQGTSVTVS

SEQ ID NO: 1049 - protein, 115 aa, synthetic construct
LQLVESGGGLVQPGGSLRLSCAASGFTLDNYAIGWFRQAPGKEREGVSSISSSGGSTNYADSVKGRFTVSRDNAKHTVYLQMNSLKPEDTAVYYCAGVGAYGRRAMGQGTSVTVS

SEQ ID NO: 1050 - protein, 115 aa, synthetic construct
LQLVESGGGLVQPGGSLRLSCAASGFTLDNYAIGWFRQAPGKEREGVSSISSSGGSTNYADSVKGRFTVSRDNAKHTVYLQMNSLKPEDTAVYYCAGVGDCGRRAMGQGTSVTVS

SEQ ID NO: 1051 - protein, 115 aa, synthetic construct
LQLVESGGGLVQPGGSLRLSCAASGFTLDNYAIGWFRQAPGKEREGVSSISSSGGSTNYADSVKGRFTVSRDNAKHTVYLQMNSLKPEDTAVYYCAGVGDYGRGAMGQGTSVTVS

SEQ ID NO: 1052 - protein, 115 aa, synthetic construct
LQLVESGGGLVQPGGSLRLSCAASGFTLDNYAIGWFRQAPGKEREGVSSISSSGGSTNYADSVKGRFTVSRDNAKHTVYLQMNSLKPEDTAVYYCAGVGDYGRRAKGQGTSVTVS

SEQ ID NO: 1053 - protein, 115 aa, synthetic construct
LQLVESGGGLVQPGGSLRLSCAASGFTLDNYAIGWFRQAPGKEREGVSSISSSGGSTNYADSVKGRFTVSRDNAKHTVYLQMNSLKPEDTAVYYCAGVGDYGRRAMDQGTSVTVS

SEQ ID NO: 1054 - protein, 118 aa, synthetic construct
LQLVESGGGLVQPGGSLRLSCAASGFTLDNYAIGWFRQAPGKEREGVSSISSSGGSTNYADSVKGRFTVSRDNAKHTVYLQMNSLKPEDTAVYYCAGVGDYGRRAMDYWGHGTSVTVS

SEQ ID NO: 1055 - protein, 115 aa, synthetic construct
LQLVESGGGLVQPGGSLRLSCAASGFTLDNYAIGWFRQAPGKEREGVSSISSSGGSTNYADSVKGRFTVSRDNAKHTVYLQMNSLKPEDTAVYYCAGVGDYGRRAMGPGASATVS

SEQ ID NO: 1056 - protein, 115 aa, synthetic construct
LQLVESGGGLVQPGGSLRLSCAASGFTLDNYAIGWFRQAPGKEREGVSSISSSGGSTNYADSVKGRFTVSRDNAKHTVYLQMNSLKPEDTAVYYCAGVGDYGRRAMGPGTSVTVS

SEQ ID NO: 1057 - protein, 115 aa, synthetic construct
LQLVESGGGLVQPGGSLRLSCAASGFTLDNYAIGWFRQAPGKEREGVSSISSSGGSTNYADSVKGRFTVSRDNAKHTVYLQMNSLKPEDTAVYYCAGVGDYGRRAMGQGASVTVS

SEQ ID NO: 1058 - protein, 115 aa, synthetic construct
LQLVESGGGLVQPGGSLRLSCAASGFTLDNYAIGWFRQAPGKEREGVSSISSSGGSTNYADSVKGRFTVSRDNAKHTVYLQMNSLKPEDTAVYYCAGVGDYGRRAMGQGPSVTVS

SEQ ID NO: 1059 - protein, 115 aa, synthetic construct
LQLVESGGGLVQPGGSLRLSCAASGFTLDNYAIGWFRQAPGKEREGVSSISSSGGSTNYADSVKGRFTVSRDNAKHTVYLQMNSLKPEDTAVYYCAGVGDYGRRAMGQGSSVTVS

SEQ ID NO: 1060 - protein, 115 aa, synthetic construct
LQLVESGGGLVQPGGSLRLSCAASGFTLDNYAIGWFRQAPGKEREGVSSISSSGGSTNYADSVKGRFTVSRDNAKHTVYLQMNSLKPEDTAVYYCAGVGDYGRRAMGQGTLVTVS

SEQ ID NO: 1061 - protein, 115 aa, synthetic construct
LQLVESGGGLVQPGGSLRLSCAASGFTLDNYAIGWFRQAPGKEREGVSSISSSGGSTNYADSVKGRFTVSRDNAKHTVYLQMNSLKPEDTAVYYCAGVGDYGRRAMGQGTPVTVS

SEQ ID NO: 1062 - protein, 115 aa, synthetic construct
LQLVESGGGLVQPGGSLRLSCAASGFTLDNYAIGWFRQAPGKEREGVSSISSSGGSTNYADSVKGRFTVSRDNAKHTVYLQMNSLKPEDTAVYYCAGVGDYGRRAMGQGTSGTVS

SEQ ID NO: 1063 - protein, 115 aa, synthetic construct
LQLVESGGGLVQPGGSLRLSCAASGFTLDNYAIGWFRQAPGKEREGVSSISSSGGSTNYADSVKGRFTVSRDNAKHTVYLQMNSLKPEDTAVYYCAGVGDYGRRAMGQGTSVAVS

SEQ ID NO: 1064 - protein, 115 aa, synthetic construct
LQLVESGGGLVQPGGSLRLSCAASGFTLDNYAIGWFRQAPGKEREGVSSISSSGGSTNYADSVKGRFTVSRDNAKHTVYLQMNSLKPEDTAVYYCAGVGDYGRRAMGQGTSVPSP

SEQ ID NO: 1065 - protein, 115 aa, synthetic construct
LQLVESGGGLVQPGGSLRLSCAASGFTLDNYAIGWFRQAPGKEREGVSSISSSGGSTNYADSVKGRFTVSRDNAKHTVYLQMNSLKPEDTAVYYCAGVGDYGRRAMGQGTSVTAP

SEQ ID NO: 1066 - protein, 115 aa, synthetic construct
LQLVESGGGLVQPGGSLRLSCAASGFTLDNYAIGWFRQAPGKEREGVSSISSSGGSTNYADSVKGRFTVSRDNAKHTVYLQMNSLKPEDTAVYYCAGVGDYGRRAMGQGTSVTIS

SEQ ID NO: 1067 - protein, 115 aa, synthetic construct
LQLVESGGGLVQPGGSLRLSCAASGFTLDNYAIGWFRQAPGKEREGVSSISSSGGSTNYADSVKGRFTVSRDNAKHTVYLQMNSLKPEDTAVYYCAGVGDYGRRAMGQGTSVTSP

SEQ ID NO: 1068 - protein, 115 aa, synthetic construct
LQLVESGGGLVQPGGSLRLSCAASGFTLDNYAIGWFRQAPGKEREGVSSISSSGGSTNYADSVKGRFTVSRDNAKHTVYLQMNSLKPEDTAVYYCAGVGDYGRRAMGQGTSVTVP

SEQ ID NO: 1069 - protein, 115 aa, synthetic construct
LQLVESGGGLVQPGGSLRLSCAASGFTLDNYAIGWFRQAPGKEREGVSSISSSGGSTNYADSVKGRFTVSRDNAKHTVYLQMNSLKPEDTAVYYCAGVGDYGRRAMGQGTSVTVS

SEQ ID NO: 1070 - protein, 115 aa, synthetic construct
LQLVESGGGLVQPGGSLRLSCAASGFTLDNYAIGWFRQAPGKEREGVSSISSSGGSTNYADSVKGRFTVSRDNAKHTVYLQMNSLKPEDTAVYYCAGVGDYGRRAMGQGTTVTVS

SEQ ID NO: 1071 - protein, 115 aa, synthetic construct
LQLVESGGGLVQPGGSLRLSCAASGFTLDNYAIGWFRQAPGKEREGVSSISSSGGSTNYADSVKGRFTVSRDNAKHTVYLQMNSLKPEDTAVYYCAGVGDYGRRAMGQSTSVTVS

SEQ ID NO: 1072 - protein, 115 aa, synthetic construct
LQLVESGGGLVQPGGSLRLSCAASGFTLDNYAIGWFRQAPGKEREGVSSISSSGGSTNYADSVKGRFTVSRDNAKHTVYLQMNSLKPEDTAVYYCAGVGDYGRRAMGQVTSVTVS

SEQ ID NO: 1073 - protein, 115 aa, synthetic construct
LQLVESGGGLVQPGGSLRLSCAASGFTLDNYAIGWFRQAPGKEREGVSSISSSGGSTNYADSVKGRFTVSRDNAKHTVYLQMNSLKPEDTAVYYCAGVGDYGRRAMGRGTSVTVS

SEQ ID NO: 1074 - protein, 115 aa, synthetic construct
LQLVESGGGLVQPGGSLRLSCAASGFTLDNYAIGWFRQAPGKEREGVSSISSSGGSTNYADSVKGRFTVSRDNAKHTVYLQMNSLKPEDTAVYYCAGVGDYGRRARGQGTSVTVS

SEQ ID NO: 1075 - protein, 115 aa, synthetic construct
LQLVESGGGLVQPGGSLRLSCAASGFTLDNYAIGWFRQAPGKEREGVSSISSSGGSTNYADSVKGRFTVSRDNAKHTVYLQMNSLKPEDTAVYYCAGVGDYGRRATGQGTSVTVS

SEQ ID NO: 1076 - protein, 115 aa, synthetic construct
LQLVESGGGLVQPGGSLRLSCAASGFTLDNYAIGWFRQAPGKEREGVSSISSSGGSTNYADSVKGRFTVSRDNAKHTVYLQMNSLKPEDTAVYYCAGVGDYGRRVMGQGTSVTVS

SEQ ID NO: 1077 - protein, 115 aa, synthetic construct
LQLVESGGGLVQPGGSLRLSCAASGFTLDNYAIGWFRQAPGKEREGVSSISSSGGSTNYADSVKGRFTVSRDNAKHTVYLQMNSLKPEDTAVYYCAGVGNYGRRAMGQGTSVTVS

SEQ ID NO: 1078 - protein, 115 aa, synthetic construct
LQLVESGGGLVQPGGSLRLSCAASGFTLDNYAIGWFRQAPGKEREGVSSISSSGGSTNYADSVKGRFTVSRDNAKHTVYLQMNSLKPEDTAVYYCAGVRDYGRRAMGQGTSVTVS

SEQ ID NO: 1079 - protein, 115 aa, synthetic construct
LQLVESGGGLVQPGGSLRLSCAASGFTLDNYAIGWFRQAPGKEREGVSSISSSGGSTNYADSVKGRFTVSRDNAKHTVYLQMNSLKPEDTAVYYCAVVGDYGRRAMGQGTSVTVS

SEQ ID NO: 1080 - protein, 115 aa, synthetic construct
LQLVESGGGLVQPGGSLRLSCAASGFTLDNYAIGWFRQAPGKEREGVSSISSSGGSTNYADSVKGRFTVSRDNAKHTVYLQMNSLKPEDTAVYYCEGVGDYGRRAMGQGTSVTVS

SEQ ID NO: 1081 - protein, 115 aa, synthetic construct
LQLVESGGGLVQPGGSLRLSCAASGFTLDNYAIGWFRQAPGKEREGVSSISSSGGSTNYADSVKGRFTVSRDNAKHTVYLQMNSLKPEDTAVYYCVGVGDYGRRAMGQGTSVTVS

SEQ ID NO: 1082 - protein, 115 aa, synthetic construct
LQLVESGGGLVQPGGSLRLSCAASGFTLDNYAIGWFRQAPGKEREGVSSISSSGGSTNYADSVKGRFTVSRDNAKHTVYLQMNSLKPEDTAVYYFAGVGDYGRRAMGQGTSVTVS

SEQ ID NO: 1083 - protein, 115 aa, synthetic construct
LQLVESGGGLVQPGGSLRLSCAASGFTLDNYAIGWFRQAPGKEREGVSSISSSGGSTNYADSVKGRFTVSRDNAKHTVYLQMNSLKPEDTAVYYRAGVGDYGRRAMGQGTSVTVS

SEQ ID NO: 1084 - protein, 115 aa, synthetic construct
LQLVESGGGLVQPGGSLRLSCAASGFTLDNYAIGWFRQAPGKEREGVSSISSSGGSTNYADSVKGRFTVSRDNAKHTVYLQMNSLKPEDTAVYYYAGVGDYGRRAMGQGTSVTVS

SEQ ID NO: 1085 - protein, 116 aa, synthetic construct
LQLVESGGGLVQPGGSLRLSCAASGFTLDNYAIGWFRQAPGKEREGVSSISSSGGSTNYADSVKGRFTVSRDNAKHTVYLQMNSLKSEDTAVYYCAAEDFGNSKTYWGQGTLVTVS

SEQ ID NO: 1086 - protein, 115 aa, synthetic construct
LQLVESGGGLVQPGGSLRLSCAASGFTLDNYAIGWFRQAPGKEREGVSSISSSGGSTNYADSVKGRFTVSRDNAKHTVYLQMNSLKSEDTAVYYCAGVGDYGRRAMGQGTSVTVS

SEQ ID NO: 1087 - protein, 115 aa, synthetic construct
LQLVESGGGLVQPGGSLRLSCAASGFTLDNYAIGWFRQAPGKEREGVSSISSSGGSTNYADSVKGRFTVSRDNAKHTVYQQMNSLKPEDTAVYYCAGVGDYGRRAMGQGTSVTVS

SEQ ID NO: 1088 - protein, 115 aa, synthetic construct
LQLVESGGGLVQPGGSLRLSCAASGFTLDNYAIGWFRQAPGKEREGVSSISSSGGSTNYADSVKGRFTVSRDNAKNSVYLQMNSLKPEDTAVYYCAGVGDYGRRAMGQGTSVTVS

SEQ ID NO: 1089 - protein, 115 aa, synthetic construct
LQLVESGGGLVQPGGSLRLSCAASGFTLDNYAIGWFRQAPGKEREGVSSISSSGGSTNYADSVKGRFTVSRDNAKNTVYLQMDSLKPEDTAVYYCAGVGDYGRRAMGQGTSVTVS

SEQ ID NO: 1090 - protein, 115 aa, synthetic construct
LQLVESGGGLVQPGGSLRLSCAASGFTLDNYAIGWFRQAPGKEREGVSSISSSGGSTNYADSVKGRFTVSRDNAKNTVYLQMNSLKPEDTAVYYCAADGDYGRRAMGQGTSVTVS

SEQ ID NO: 1091 - protein, 115 aa, synthetic construct
LQLVESGGGLVQPGGSLRLSCAASGFTLDNYAIGWFRQAPGKEREGVSSISSSGGSTNYADSVKGRFTVSRDNAKNTVYLQMNSLKPEDTAVYYCAAVGDYGRRAMGQGTSVTVS

SEQ ID NO: 1092 - protein, 115 aa, synthetic construct
LQLVESGGGLVQPGGSLRLSCAASGFTLDNYAIGWFRQAPGKEREGVSSISSSGGSTNYADSVKGRFTVSRDNAKNTVYLQMNSLKPEDTAVYYCAGVGDYGRRAMGQGTSVTVS

SEQ ID NO: 1093 - protein, 115 aa, synthetic construct
LQLVESGGGLVQPGGSLRLSCAASGFTLDNYAIGWFRQAPGKEREGVSSISSSGGSTNYADSVKGRFTVSRDNAKPTVYLQMNSLKPEDTAVYYCAGVGDYGRRAMGQGTSVTVS

SEQ ID NO: 1094 - protein, 115 aa, synthetic construct
LQLVESGGGLVQPGGSLRLSCAASGFTLDNYAIGWFRQAPGKEREGVSSISSSGGSTNYADSVKGRFTVSRDNAKQTVSLQMNSLKPEDTAVYYCAGVGDYGRRAMGQGTSVTVS

SEQ ID NO: 1095 - protein, 115 aa, synthetic construct
LQLVESGGGLVQPGGSLRLSCAASGFTLDNYAIGWFRQAPGKEREGVSSISSSGGSTNYADSVKGRFTVSRDNAKQTVYLQINSLKPEDTAVYYCAGVGDYGRRAMGQGTSVTVS

SEQ ID NO: 1096 - protein, 115 aa, synthetic construct
LQLVESGGGLVQPGGSLRLSCAASGFTLDNYAIGWFRQAPGKEREGVSSISSSGGSTNYADSVKGRFTVSRDNAKQTVYLQMNSLKLEDTAVYYCAGVGDYGRRAMGQGTSVTVS

SEQ ID NO: 1097 - protein, 115 aa, synthetic construct
LQLVESGGGLVQPGGSLRLSCAASGFTLDNYAIGWFRQAPGKEREGVSSISSSGGSTNYADSVKGRFTVSRDNAKQTVYLQMNSLKPEDTAVYYCAAVGDYGRRAMGQGTSVTVS

SEQ ID NO: 1098 - protein, 115 aa, synthetic construct
LQLVESGGGLVQPGGSLRLSCAASGFTLDNYAIGWFRQAPGKEREGVSSISSSGGSTNYADSVKGRFTVSRDNAKQTVYLQMNSLKPEDTAVYYCAGVGDYGRRAMGPGASVTVS

SEQ ID NO: 1099 - protein, 115 aa, synthetic construct
LQLVESGGGLVQPGGSLRLSCAASGFTLDNYAIGWFRQAPGKEREGVSSISSSGGSTNYADSVKGRFTVSRDNAKQTVYLQMNSLKPEDTAVYYCAGVGDYGRRAMGPGTSVTVS

SEQ ID NO: 1100 - protein, 115 aa, synthetic construct
LQLVESGGGLVQPGGSLRLSCAASGFTLDNYAIGWFRQAPGKEREGVSSISSSGGSTNYADSVKGRFTVSRDNAKQTVYLQMNSLKPEDTAVYYCAGVGDYGRRAMGQGASVTVS

SEQ ID NO: 1101 - protein, 115 aa, synthetic construct
LQLVESGGGLVQPGGSLRLSCAASGFTLDNYAIGWFRQAPGKEREGVSSISSSGGSTNYADSVKGRFTVSRDNAKQTVYLQMNSLKPEDTAVYYCAGVGDYGRRAMGQGTPVTVS

SEQ ID NO: 1102 - protein, 115 aa, synthetic construct
LQLVESGGGLVQPGGSLRLSCAASGFTLDNYAIGWFRQAPGKEREGVSSISSSGGSTNYADSVKGRFTVSRDNAKQTVYLQMNSLKPEDTAVYYCAGVGDYGRRAMGQGTSVTVS

SEQ ID NO: 1103 - protein, 115 aa, synthetic construct
LQLVESGGGLVQPGGSLRLSCAASGFTLDNYAIGWFRQAPGKEREGVSSISSSGGSTNYADSVKGRFTVSRDNAKQTVYLQMNSLKPEDTAVYYCAGVGDYGRRAMGQGTTVTVS

SEQ ID NO: 1104 - protein, 115 aa, synthetic construct
LQLVESGGGLVQPGGSLRLSCAASGFTLDNYAIGWFRQAPGKEREGVSSISSSGGSTNYADSVKGRFTVSRDNAKQTVYLQMNSLKPEDTAVYYCAGVGDYGRRAMGQVTSVTVS

SEQ ID NO: 1105 - protein, 115 aa, synthetic construct
LQLVESGGGLVQPGGSLRLSCAASGFTLDNYAIGWFRQAPGKEREGVSSISSSGGSTNYADSVKGRFTVSRDNAKQTVYLQMNSLKPEDTAVYYFAGVGDYGRRAMGQGTSVTVS

SEQ ID NO: 1106 - protein, 116 aa, synthetic construct
LQLVESGGGLVQPGGSLRLSCAASGFTLDNYAIGWFRQAPGKEREGVSSISSSGGSTNYADSVKGRFTVSRDNAKQTVYLQMNSLKSEDTAVYYCAAEDFGNSKTYWGQGTLVTVS

SEQ ID NO: 1107 - protein, 115 aa, synthetic construct
LQLVESGGGLVQPGGSLRLSCAASGFTLDNYAIGWFRQAPGKEREGVSSISSSGGSTNYADSVKGRFTVSRDNVKHTVYLQMNSLKPEDTAVYYCAGVGDYGRRAMGQGTSVTVS

SEQ ID NO: 1108 - protein, 115 aa, synthetic construct
LQLVESGGGLVQPGGSLRLSCAASGFTLDNYAIGWFRQAPGKEREGVSSISSSGGSTNYADSVKGRFTVSRDYAKHTVYLQMNSLKPEDTAVYYCAGVGDYGRRAMGQGTSVTVS

SEQ ID NO: 1109 - protein, 115 aa, synthetic construct
LQLVESGGGLVQPGGSLRLSCAASGFTLDNYAIGWFRQAPGKEREGVSSISSSGGSTNYADSVKGRFTVSRDYAKNTVYLQMDSLKPEDTAVYYCAADGDYGRRAMGQGTSVTVS

SEQ ID NO: 1110 - protein, 115 aa, synthetic construct
LQLVESGGGLVQPGGSLRLSCAASGFTLDNYAIGWFRQAPGKEREGVSSISSSGGSTNYADSVKGRFTVSRDYAKNTVYLQMDSLKPEDTAVYYCAGVGDYGRRAMGQGTSVTVS

SEQ ID NO: 1111 - protein, 115 aa, synthetic construct
LQLVESGGGLVQPGGSLRLSCAASGFTLDNYAIGWFRQAPGKEREGVSSISSSGGSTNYADSVKGRFTVSRDYAKNTVYLQMNSLKPEDTAVYYCAGVGDYGRRAMGQGTSVTVS

SEQ ID NO: 1112 - protein, 115 aa, synthetic construct
LQLVESGGGLVQPGGSLRLSCAASGFTLDNYAIGWFRQAPGKEREGVSSISSSGGSTNYADSVKGRFTVSRDYAKQTVYLQMNSLKPEDTAVYYCAGVGDYGRRAMGQGTSVTVS

SEQ ID NO: 1113 - protein, 115 aa, synthetic construct
LQLVESGGGLVQPGGSLRLSCAASGFTLDNYAIGWFRQAPGKEREGVSSISSSGGSTNYADSVKWRFTVSRDNAKHTVYLQMNSLKPEDTAVYYCAGVGDYGRRAMGQGTSVTVS

SEQ ID NO: 1114 - protein, 115 aa, synthetic construct
LQLVESGGGLVQPGGSLRLSCAASGFTLDNYAIGWFRQAPGKEREGVSSISSSGGSTNYADSVTGRFTVSRDNAKHTVYLQMNSLKPEDTAVYYCAGVGDYGRRAMGQGTSVTVS

SEQ ID NO: 1115 - protein, 115 aa, synthetic construct
LQLVESGGGLVQPGGSLRLSCAASGFTLDNYAIGWFRQAPGKEREGVSSISSSGGSTNYANSVKGRFTVSRDNAKHTVYLQMNSLKPEDTAVYYCAGVGDYGRRAMGQGTSVTVS

SEQ ID NO: 1116 - protein, 115 aa, synthetic construct
LQLVESGGGLVQPGGSLRLSCAASGFTLDNYAIGWFRQAPGKEREGVSSISSSGGSTNYAVSVKGRFTVSRDNAKHTVYLQMNSLKPEDTAVYYCAGVGDYGRRAMGQGTSVTVS

SEQ ID NO: 1117 - protein, 115 aa, synthetic construct
LQLVESGGGLVQPGGSLRLSCAASGFTLDNYAIGWFRQAPGKEREGVSSISSSGGSTNYSDSVKGRFTVSRDNAKHTVYLQMNSLKPEDTAVYYCAGVGDYGRRAMGQGTSVTVS

SEQ ID NO: 1118 - protein, 115 aa, synthetic construct
LQLVESGGGLVQPGGSLRLSCAASGFTLDNYAIGWFRQAPGKEREGVSSISSSGGSTTYADSVKGRFTISRDNAKHTVYLQMNSLKPEDTAVYYCAGVGDYGRRAMGQGTSVTVS

SEQ ID NO: 1119 - protein, 115 aa, synthetic construct
LQLVESGGGLVQPGGSLRLSCAASGFTLDNYAIGWFRQAPGKEREGVSSISSSGGSTTYADSVKGRFTISRDNAKNTVYLQMNSLKPEDTAVYYCAGVGDYGRRAMGQGTSVTVS

SEQ ID NO: 1120 - protein, 115 aa, synthetic construct
LQLVESGGGLVQPGGSLRLSCAASGFTLDNYAIGWFRQAPGKEREGVSSISSSGGSTTYADSVKGRFTISRDYAKHTVYLQMNSLKPEDTAVYYCAGVGDYGRRAMGQGTSVTVS

SEQ ID NO: 1121 - protein, 115 aa, synthetic construct
LQLVESGGGLVQPGGSLRLSCAASGFTLDNYAIGWFRQAPGKEREGVSSISSSGGSTTYADSVKGRFTISRDYAKNTVYLQMDSLKPEDTAVYYCAGVGDYGRRAMGQGTSVTVS

SEQ ID NO: 1122 - protein, 115 aa, synthetic construct
LQLVESGGGLVQPGGSLRLSCAASGFTLDNYAIGWFRQAPGKEREGVSSISSSGGSTTYADSVKGRFTISRDYAKNTVYLQMNSLKPEDTAVYYCAGVGDYGRRAMGQGTSVTVS

SEQ ID NO: 1123 - protein, 115 aa, synthetic construct
LQLVESGGGLVQPGGSLRLSCAASGFTLDNYAIGWFRQAPGKEREGVSSISSSGGSTTYADSVKGRFTVSRDNAKHTVYLQMNSLKPEDTAVYYCAGVGDYGRRAMGQGTSVTVS

SEQ ID NO: 1124 - protein, 115 aa, synthetic construct
LQLVESGGGLVQPGGSLRLSCAASGFTLDNYAIGWFRQAPGKEREGVSSISSSGGSTTYADSVKGRFTVSRDNAKQTVYLQMNSLKPEDTAVYYCAGVGDYGRRAMGQGTSVTVS

SEQ ID NO: 1125 - protein, 115 aa, synthetic construct
LQLVESGGGLVQPGGSLRLSCAASGFTLDNYAIGWFRQAPGKEREWVSSISSSGGSTNYADSVKGRFTVSRDNAKHTVYLQMNSLKPEDTAVYYCAGVGDYGRRAMGQGTSVTVS

SEQ ID NO: 1126 - protein, 115 aa, synthetic construct
LQLVESGGGLVQPGGSLRLSCAASGFTLDNYAIGWFRQAPGQEREGVSSISSSGGSTNYADSVKGRFTVSRDNAKHTVYLQMNSLKPEDTAVYYCAAVGDYGRRAMGQGTSVTVS

SEQ ID NO: 1127 - protein, 115 aa, synthetic construct
LQLVESGGGLVQPGGSLRLSCAASGFTLDNYAIGWFRQAPGQEREGVSSISSSGGSTNYADSVKGRFTVSRDNAKHTVYLQMNSLKPEDTAVYYCAGVGDYGRRAMGQGTSVTVS

SEQ ID NO: 1128 - protein, 115 aa, synthetic construct
LQLVESGGGLVQPGGSLRLSCAASGFTLDNYAIGWFRQAPGQEREGVSSISSSGGSTNYADSVKGRFTVSRDNAKNTVYLQMNSLKPEDTAVYYCAAVGDYGRRAMGQGTSVTVS

SEQ ID NO: 1129 - protein, 115 aa, synthetic construct
LQLVESGGGLVQPGGSLRLSCAASGFTLDNYAIGWFRQAPGQEREGVSSISSSGGSTNYADSVKGRFTVSRDNAKNTVYLQMNSLKPEDTAVYYCAGVGDYGRRAMGQGTSVTVS

SEQ ID NO: 1130 - protein, 115 aa, synthetic construct
LQLVESGGGLVQPGGSLRLSCAASGFTLDNYAIGWFRQAPGQEREGVSSISSSGGSTNYADSVKGRFTVSRDNAKQTVYLQMNSLKPEDTAVYYCAGVGDYGRRAMGQGTSVTVS

SEQ ID NO: 1131 - protein, 115 aa, synthetic construct
LQLVESGGGLVQPGGSLRLSCAASGFTLDNYAIGWFRQAPGTEREGVSSISSSGGSTNYADSVKGRFTVSRDNAKHTVYLQMNSLKPEDTAVYYCAGVGDYGRRAMGQGTSVTVS

SEQ ID NO: 1132 - protein, 115 aa, synthetic construct
LQLVESGGGLVQPGGSLRLSCAASGFTLDNYAIGWFRQAPGTEREGVSSISSSGGSTNYADSVKGRFTVSRDNAKNTVYLQMNSLKPEDTAVYYCAAVGDYGRRAMGQGTSVTVS

SEQ ID NO: 1133 - protein, 115 aa, synthetic construct
LQLVESGGGLVQPGGSLRLSCAASGFTLDNYAIGWFRQAPGTEREGVSSISSSGGSTNYADSVKGRFTVSRDNAKNTVYLQMNSLKPEDTAVYYCAGVGDYGRRAMGQGTSVTVS

SEQ ID NO: 1134 - protein, 115 aa, synthetic construct
LQLVESGGGLVQPGGSLRLSCAASGFTLDNYAIGWFRQAPGTEREGVSSISSSGGSTNYADSVKGRFTVSRDNAKQTVYLQMNSLKPEDTAVYYCAGVGDYGRRAMGQGTSVTVS

SEQ ID NO: 1135 - protein, 115 aa, synthetic construct
LQLVESGGGLVQPGGSLRLSCAASGFTLDNYAIGWFRQVPGKEREGVSSISSSGGSTNYADSVKGRFTVSRDNAKHTVYLQMNSLKPEDTAVYYCAGVGDYGRRAMGQGTSVTVS

SEQ ID NO: 1136 - protein, 115 aa, synthetic construct
LQLVESGGGLVQPGGSLRLSCAASGFTLDNYAIGWFRRAPGKEREGVSSISSSGGSTNYADSVKGRFTVSRDNAKHTVYLQMNSLKPEDTAVYYCAGVGDYGRRAMGQGTSVTVS

SEQ ID NO: 1137 - protein, 115 aa, synthetic construct
LQLVESGGGLVQPGGSLRLSCAASGFTLDNYAIGWLRQAPGKEREGVSSISSSGGSTNYADSVKGRFTVSRDNAKHTVYLQMNSLKPEDTAVYYCAGVGDYGRRAMGQGTSVTVS

SEQ ID NO: 1138 - protein, 115 aa, synthetic construct
LQLVESGGGLVQPGGSLRLSCAASGFTLDNYAIGWVRQAPGKEREGVSSISSSGGSTNYADSVKGRFTVSRDNAKHTVYLQMNSLKPEDTAVYYCAGVGDYGRRAMGQGTSVTVS

SEQ ID NO: 1139 - protein, 115 aa, synthetic construct
LQLVESGGGLVQPGGSLRLSCAASGFTLDNYAVGWFRQAPGKEREGVSSISSSGGSTNYADSVKGRFTVSRDNAKHTVYLQMNSLKPEDTAVYYCAGVGDYGRRAMGQGTSVTVS

SEQ ID NO: 1140 - protein, 115 aa, synthetic construct
LQLVESGGGLVQPGGSLRLSCAASGFTLDNYAVGWFRQAPGTEREGVSSISSSGGSTNYADSVKGRFTVSRDNAKHTVYLQMNSLKPEDTAVYYCAGVGDYGRRAMGQGTSVTVS

SEQ ID NO: 1141 - protein, 115 aa, synthetic construct
LQLVESGGGLVQPGGSLRLSCAASGFTLDNYAVGWFRQAPGTEREGVSSISSSGGSTNYADSVKGRFTVSRDNAKQTVYLQMNSLKPEDTAVYYCAGVGDYGRRAMGQGTSVTVS

SEQ ID NO: 1142 - protein, 115 aa, synthetic construct
LQLVESGGGLVQPGGSLRLSCAASGFTLDSYAIGWFRQAPGKEREGVSCISSSGGSTNYADSVKGRFTVSRDNAKHTVYLQMNSLKPEDTAVYYCAAVGDYGRRAMGQGTSVTVS

SEQ ID NO: 1143 - protein, 115 aa, synthetic construct
LQLVESGGGLVQPGGSLRLSCAASGFTLDSYAIGWFRQAPGKEREGVSCISSSGGSTNYADSVKGRFTVSRDNAKHTVYLQMNSLKPEDTAVYYCAGVGDYGRRAMGQGTSVTVS

SEQ ID NO: 1144 - protein, 115 aa, synthetic construct
LQLVESGGGLVQPGGSLRLSCAASGFTLDSYAIGWFRQAPGKEREGVSCISSSGGSTNYADSVKGRFTVSRDNAKQTVYLQMNSLKPEDTAVYYCAGVGDYGRRAMGQGTSVTVS

SEQ ID NO: 1145 - protein, 115 aa, synthetic construct
LQLVESGGGLVQPGGSLRLSCAASGFTLDSYAIGWFRQAPGKEREGVSSISSSGGSTNYADSVKGRFTISRDNAKNTVYLQMNSLKPEDTAVYYCAGVGDYGRRAMGQGTSVTVS

SEQ ID NO: 1146 - protein, 116 aa, synthetic construct
LQLVESGGGLVQPGGSLRLSCAASGFTLDSYAIGWFRQAPGKEREGVSSISSSGGSTNYADSVKGRFTVSRDNAKHTVYLQMNSLKPEDTAVYYCAAEDFGNSKTYWGQGTLVTVS

SEQ ID NO: 1147 - protein, 115 aa, synthetic construct
LQLVESGGGLVQPGGSLRLSCAASGFTLDSYAIGWFRQAPGKEREGVSSISSSGGSTNYADSVKGRFTVSRDNAKHTVYLQMNSLKPEDTAVYYCAAVGDYGRRAMGQGTSVTVS

SEQ ID NO: 1148 - protein, 115 aa, synthetic construct
LQLVESGGGLVQPGGSLRLSCAASGFTLDSYAIGWFRQAPGKEREGVSSISSSGGSTNYADSVKGRFTVSRDNAKHTVYLQMNSLKPEDTAVYYCAGVGDYGRRAMGQGTSVTVS

SEQ ID NO: 1149 - protein, 115 aa, synthetic construct
LQLVESGGGLVQPGGSLRLSCAASGFTLDSYAIGWFRQAPGKEREGVSSISSSGGSTNYADSVKGRFTVSRDNAKHTVYLQMNSLKPEDTAVYYCAGVGDYGRRAMGQGTTVTVS

SEQ ID NO: 1150 - protein, 115 aa, synthetic construct
LQLVESGGGLVQPGGSLRLSCAASGFTLDSYAIGWFRQAPGKEREGVSSISSSGGSTNYADSVKGRFTVSRDNAKNTVYLQMNSLKPEDTAVYYCAAVGDYGRRAMGQGTSVTVS

SEQ ID NO: 1151 - protein, 115 aa, synthetic construct
LQLVESGGGLVQPGGSLRLSCAASGFTLDSYAIGWFRQAPGKEREGVSSISSSGGSTNYADSVKGRFTVSRDNAKNTVYLQMNSLKPEDTAVYYCAGVGDYGRRAMGQGTSVTVS

SEQ ID NO: 1152 - protein, 115 aa, synthetic construct
LQLVESGGGLVQPGGSLRLSCAASGFTLDSYAIGWFRQAPGKEREGVSSISSSGGSTNYADSVKGRFTVSRDNAKQTVYLQMNSLKPEDTAVYYCAGVGDYGRRAMGQGTSVTVS

SEQ ID NO: 1153 - protein, 115 aa, synthetic construct
LQLVESGGGLVQPGGSLRLSCAASGFTLDSYAIGWFRQAPGQEREGVSSISSSGGSTNYADSVKGRFTVSRDNAKHTVYLQMNSLKPEDTAVYYCAGVGDYGRRAMGQGTSVTVS

SEQ ID NO: 1154 - protein, 115 aa, synthetic construct
LQLVESGGGLVQPGGSLRLSCAASGFTLDSYAIGWFRQAPGQEREGVSSISSSGGSTNYADSVKGRFTVSRDNAKQTVYLQMNSLKPEDTAVYYCAGVGDYGRRAMGQGTSVTVS

SEQ ID NO: 1155 - protein, 115 aa, synthetic construct
LQLVESGGGLVQPGGSLRLSCAASGFTLDSYAVGWFRQAPGKEREGVSCISSSGGSTNYADSVKGRFTVSRDNAKQTVYLQMNSLKPEDTAVYYCAGVGDYGRRAMGQGTSVTVS

SEQ ID NO: 1156 - protein, 115 aa, synthetic construct
LQLVESGGGLVQPGGSLRLSCAASGFTLDSYAVGWFRQAPGKEREGVSSISSSGGSTNYADSVKGRFTVSRDNAKHTVYLQMNSLKPEDTAVYYCAAVGDYGRRAMGQGTSVTVS

SEQ ID NO: 1157 - protein, 115 aa, synthetic construct
LQLVESGGGLVQPGGSLRLSCAASGFTLDSYAVGWFRQAPGKEREGVSSISSSGGSTNYADSVKGRFTVSRDNAKHTVYLQMNSLKPEDTAVYYCAGVGDYGRRAMGQGTSVTVS

SEQ ID NO: 1158 - protein, 115 aa, synthetic construct
LQLVESGGGLVQPGGSLRLSCAASGFTLDSYAVGWFRQAPGKEREGVSSISSSGGSTNYADSVKGRFTVSRDNAKNTVYLQMNSLKPEDTAVYYCAGVGDYGRRAMGQGTSVTVS

SEQ ID NO: 1159 - protein, 115 aa, synthetic construct
LQLVESGGGLVQPGGSLRLSCAASGFTLDSYAVGWFRQAPGKEREGVSSISSSGGSTNYADSVKGRFTVSRDNAKQTVYLQMNSLKPEDTAVYYCAGVGDYGRRAMGQGTSVTVS

SEQ ID NO: 1160 - protein, 115 aa, synthetic construct
LQLVESGGGLVQPGGSLRLSCAASGFTLDSYAVGWFRQAPGQEREGVSSISSSGGSTNYADSVKGRFTVSRDNAKHTVYLQMNSLKPEDTAVYYCAGVGDYGRRAMGQGTSVTVS

SEQ ID NO: 1161 - protein, 115 aa, synthetic construct
LQLVESGGGLVQPGGSLRLSCAASGFTLDSYAVGWFRQAPGTEREGVSCISSSGGSTNYADSVKGRFTVSRDNAKHTVYLQMNSLKPEDTAVYYCAGVGDYGRRAMGQGTSVTVS

SEQ ID NO: 1162 - protein, 115 aa, synthetic construct
LQLVESGGGLVQPGGSLRLSCAASGFTLDSYAVGWFRQAPGTEREGVSSISSSGGSTNYADSVKGRFTISRDNAKHTVYLQMNSLKPEDTAVYYCAGVGDYGRRAMGQGTSVTVS

SEQ ID NO: 1163 - protein, 115 aa, synthetic construct
LQLVESGGGLVQPGGSLRLSCAASGFTLDSYAVGWFRQAPGTEREGVSSISSSGGSTNYADSVKGRFTVSRDNAKHTVYLQMNSLKPEDTAVYYCAAVGDYGRRAMGQGTSVTVS

SEQ ID NO: 1164 - protein, 115 aa, synthetic construct
LQLVESGGGLVQPGGSLRLSCAASGFTLDSYAVGWFRQAPGTEREGVSSISSSGGSTNYADSVKGRFTVSRDNAKHTVYLQMNSLKPEDTAVYYCAGVGDYGRRAMGQGTSVTVS

SEQ ID NO: 1165 - protein, 116 aa, synthetic construct
LQLVESGGGLVQPGGSLRLSCAASGFTLDSYAVGWFRQAPGTEREGVSSISSSGGSTNYADSVKGRFTVSRDNAKHTVYLQMNSLKSEDTAVYYCAAEDFGNSKTYWGQGTLVTVS

SEQ ID NO: 1166 - protein, 115 aa, synthetic construct
LQLVESGGGLVQPGGSLRLSCAASGFTLDSYAVGWFRQAPGTEREGVSSISSSGGSTNYADSVKGRFTVSRDNAKNTVYLQMNSLKPEDTAVYYCAAVGDYGRRAMGQGTSVTVS

SEQ ID NO: 1167 - protein, 115 aa, synthetic construct
LQLVESGGGLVQPGGSLRLSCAASGFTLDSYAVGWFRQAPGTEREGVSSISSSGGSTNYADSVKGRFTVSRDNAKNTVYLQMNSLKPEDTAVYYCAGVGDYGRRAMGQGTSVTVS

SEQ ID NO: 1168 - protein, 115 aa, synthetic construct
LQLVESGGGLVQPGGSLRLSCAASGFTLDSYAVGWFRQAPGTEREGVSSISSSGGSTNYADSVKGRFTVSRDNAKQTVYLQMNSLKPEDTAVYYCAGVGDYGRRAMGQGTSVTVS

SEQ ID NO: 1169 - protein, 115 aa, synthetic construct
LQLVESGGGLVQPGGSLRLSCAASGFTLDYYAIGWFRQAPGKEREGVSCISSSGGSTHYADSVKGRFTVSRDNAKQTVYLQMNSLKPEDTAVYYCAGVGDYGRRAMGQGTSVTVS

SEQ ID NO: 1170 - protein, 115 aa, synthetic construct
LQLVESGGGLVQPGGSLRLSCAASGFTLDYYAIGWFRQAPGKEREGVSSISSSGGSTNYADSVKGRFTVSRDNAKHTVYLQMNSLKPEDTAVYYCAAVGDYGRRAMGQGTSVTVS

SEQ ID NO: 1171 - protein, 115 aa, synthetic construct
LQLVESGGGLVQPGGSLRLSCAASGFTLDYYAIGWFRQAPGKEREGVSSISSSGGSTNYADSVKGRFTVSRDNAKHTVYLQMNSLKPEDTAVYYCAGVGDYGRRAMGQGTSVTVS

SEQ ID NO: 1172 - protein, 115 aa, synthetic construct
LQLVESGGGLVQPGGSLRLSCAASGFTLDYYAIGWFRQAPGKEREGVSSISSSGGSTNYADSVKGRFTVSRDNAKQTVYLQMNSLKPEDTAVYYCAGVGDYGRRAMGQGTSVTVS

SEQ ID NO: 1173 - protein, 115 aa, synthetic construct
LQLVESGGGLVQPGGSLRLSCAASGFTLDYYAIGWFRQAPGQEREGVSSISSSGGSTNYADSVKGRFTVSRDNAKHTVYLQMNSLKPEDTAVYYCAGVGDYGRRAMGQGTSVTVS

SEQ ID NO: 1174 - protein, 115 aa, synthetic construct
LQLVESGGGLVQPGGSLRLSCAASGFTLGNYAIGWFRQAPGKEREGVSSISSSGGSTNYADSVKGRFTVSRDNAKHTVYLQMNSLKPEDTAVYYCAGVGDYGRRAMGQGTSVTVS

SEQ ID NO: 1175 - protein, 115 aa, synthetic construct
LQLVESGGGLVQPGGSLRLSCAASGFTLNYYAIGWFRQAPGKEREGVSCISSSGGSTNYADSVKGRFTVSRDNAKQTVYLQMNSLKPEDTAVYYCAGVGDYGRRAMGQGTSVTVS

SEQ ID NO: 1176 - protein, 115 aa, synthetic construct
LQLVESGGGLVQPGGSLRLSCAASGFTLNYYAIGWFRQAPGKEREGVSSISSSGGSTNYADSVKGRFTVSRDNAKHTVYLQMNSLKPEDTAVYYCAAVGDYGRRAMGQGTSVTVS

SEQ ID NO: 1177 - protein, 115 aa, synthetic construct
LQLVESGGGLVQPGGSLRLSCAASGFTLNYYAIGWFRQAPGKEREGVSSISSSGGSTNYADSVKGRFTVSRDNAKHTVYLQMNSLKPEDTAVYYCAGVGDYGRRAMGQGTSVTVS

SEQ ID NO: 1178 - protein, 115 aa, synthetic construct
LQLVESGGGLVQPGGSLRLSCAASGFTLNYYAIGWFRQAPGKEREGVSSISSSGGSTNYADSVKGRFTVSRDNAKHTVYLQMNSLKPEDTAVYYCAGVGDYGRRAMGQGTTVTVS

SEQ ID NO: 1179 - protein, 115 aa, synthetic construct
LQLVESGGGLVQPGGSLRLSCAASGFTLNYYAIGWFRQAPGKEREGVSSISSSGGSTNYADSVKGRFTVSRDNAKNTVYLQMNSLKPEDTAVYYCAAVGDYGRRAMGQGTSVTVS

SEQ ID NO: 1180 - protein, 115 aa, synthetic construct
LQLVESGGGLVQPGGSLRLSCAASGFTLNYYAIGWFRQAPGKEREGVSSISSSGGSTNYADSVKGRFTVSRDNAKNTVYLQMNSLKPEDTAVYYCAGVGDYGRRAMGQGTSVTVS

SEQ ID NO: 1181 - protein, 115 aa, synthetic construct
LQLVESGGGLVQPGGSLRLSCAASGFTLNYYAIGWFRQAPGKEREGVSSISSSGGSTNYADSVKGRFTVSRDNAKQTVYLQMNSLKPEDTAVYYCAGVGDYGRRAMGQGTSVTVS

SEQ ID NO: 1182 - protein, 115 aa, synthetic construct
LQLVESGGGLVQPGGSLRLSCAASGFTLNYYAIGWFRQAPGKEREGVSSISSSGGSTNYADSVKGRFTVSRDYAKHTVYLQMNSLKPEDTAVYYCAGVGDYGRRAMGQGTSVTVS

SEQ ID NO: 1183 - protein, 115 aa, synthetic construct
LQLVESGGGLVQPGGSLRLSCAASGFTLNYYAIGWFRQAPGQEREGVSSISSSGGSTNYADSVKGRFTVSRDNAKHTVYLQMNSLKPEDTAVYYCAGVGDYGRRAMGQGTSVTVS

SEQ ID NO: 1184 - protein, 115 aa, synthetic construct
LQLVESGGGLVQPGGSLRLSCAASGFTLNYYAIGWFRQAPGTEREGVSSISSSGGSTNYADSVKGRFTVSRDNAKHTVYLQMNSLKPEDTAVYYCAGVGDYGRRAMGQGTSVTVS

SEQ ID NO: 1185 - protein, 115 aa, synthetic construct
LQLVESGGGLVQPGGSLRLSCAASGFTRDNYAIGWFRQAPGKEREGVSSISSSGGSTNYADSVKGRFTVSRDNAKHTVYLQMNSLKPEDTAVYYCAGVGDYGRRAMGQGTSVTVS

SEQ ID NO: 1186 - protein, 115 aa, synthetic construct
LQLVESGGGLVQPGGSLRLSCAASGVTLDNYAIGWFRQAPGKEREGVSSISSSGGSTNYADSVKGRFTVSRDNAKHTVYLQMNSLKPEDTAVYYCAGVGDYGRRAMGQGTSVTVS

SEQ ID NO: 1187 - protein, 115 aa, synthetic construct
LQLVESGGGLVQPGGSLRLSCAASGVTLDNYAIGWFRQAPGKEREGVSSISSSGGSTNYADSVKGRFTVSRDNAKQTVYLQMNSLKPEDTAVYYCAGVGDYGRRAMGQGTSVTVS

SEQ ID NO: 1188 - protein, 115 aa, synthetic construct
LQLVESGGGLVQPGGSLRLSCAASGVTLDSYAIGWFRQAPGKEREGVSSISSSGGSTNYADSVKGRFTVSRDNAKHTVYLQMNSLKPEDTAVYYCAGVGDYGRRAMGQGTSVTVS

SEQ ID NO: 1189 - protein, 115 aa, synthetic construct
LQLVESGGGLVQPGGSLRLSCAASGVTLDSYAVGWFRQAPGTEREGVSSISSSGGSTNYADSVKGRFTVSRDNAKHTVYLQMNSLKPEDTAVYYCAGVGDYGRRAMGQGTSVTVS

SEQ ID NO: 1190 - protein, 115 aa, synthetic construct
LQLVESGGGLVQPGGSLRLSCAASGVTLNYYAIGWFRQAPGKEREGVSSISSSGGSTNYADSVKGRFTVSRDNAKHTVYLQMNSLKPEDTAVYYCAGVGDYGRRAMGQGTSVTVS

SEQ ID NO: 1191 - protein, 115 aa, synthetic construct
LQLVESGGGLVQPGGSLRLSCATSGFTLDNYAIGWFRQAPGKEREGVSSISSSGGSTNYADSVKGRFTVSRDNAKHTVYLQMNSLKPEDTAVYYCAGVGDYGRRAMGQGTSVTVS

SEQ ID NO: 1192 - protein, 115 aa, synthetic construct
LQLVESGGGLVQPGGSLRLSCDASGFTLDNYAIGWFRQAPGKEREGVSSISSSGGSTNYADSVKGRFTVSRDNAKHTVYLQMNSLKPEDTAVYYCAGVGDYGRRAMGQGTSVTVS

SEQ ID NO: 1193 - protein, 115 aa, synthetic construct
LQLVESGGGLVQPGGSLRLSRAASGFTLDNYAIGWFRQAPGKEREGVSSISSSGGSTNYADSVKGRFTVSRDNAKHTVYLQMNSLKPEDTAVYYCAGVGDYGRRAMGQGTSVTVS

SEQ ID NO: 1194 - protein, 115 aa, synthetic construct
LQLVESGGGLVQPGGSLRLSSAASGFTLDNYAIGWFRQAPGKEREGVSSISSSGGSTNYADSVKGRFTVSRDNAKHTVYLQMNSLKPEDTAVYYCAGVGDYGRRAMGQGTSVTVS

SEQ ID NO: 1195 - protein, 115 aa, synthetic construct
LQLVESGGGLVQPGGSLRLSYAASGFTLDNYAIGWFRQAPGKEREGVSSISSSGGSTNYADSVKGRFTVSRDNAKHTVYLQMNSLKPEDTAVYYCAGVGDYGRRAMGQGTSVTVS

SEQ ID NO: 1196 - protein, 115 aa, synthetic construct
LQLVESGGGLVQPGGSLRLTCAASGFALDSYAIGWFRQAPGKEREGVSSISSSGGSTNYADSVKGRFTVSRDNAKHTVYLQMNSLKPEDTAVYYCAGVGDYGRRAMGQGTSVTVS

SEQ ID NO: 1197 - protein, 115 aa, synthetic construct
LQLVESGGGLVQPGGSLRLTCAASGFALDSYAIGWFRQAPGKEREGVSSISSSGGSTNYADSVKGRFTVSRDNAKQTVYLQMNSLKPEDTAVYYCAGVGDYGRRAMGQGTSVTVS

SEQ ID NO: 1198 - protein, 115 aa, synthetic construct
LQLVESGGGLVQPGGSLRLTCAASGFSLDSYAIGWFRQAPGKEREGVSSISSSGGSTNYADSVKGRFTVSRDNAKHTVYLQMNSLKPEDTAVYYCAGVGDYGRRAMGQGTSVTVS

SEQ ID NO: 1199 - protein, 115 aa, synthetic construct
LQLVESGGGLVQPGGSLRLTCAASGFSLDSYAIGWFRQAPGQEREGVSSISSSGGSTNYADSVKGRFTVSRDNAKHTVYLQMNSLKPEDTAVYYCAGVGDYGRRAMGQGTSVTVS

SEQ ID NO: 1200 - protein, 115 aa, synthetic construct
LQLVESGGGLVQPGGSLRLTCAASGFSLDSYAIGWFRQAPGQEREGVSSISSSGGSTNYADSVKGRFTVSRDNAKQTVYLQMNSLKPEDTAVYYCAGVGDYGRRAMGQGTSVTVS

SEQ ID NO: 1201 - protein, 115 aa, synthetic construct
LQLVESGGGLVQPGGSLRLTCAASGFTLDFYAIGWFRQAPGKEREGVSSISSSGGSTNYADSVKGRFTVSRDNAKHTVYLQMNSLKPEDTAVYYCAGVGDYGRRAMGQGTSVTVS

SEQ ID NO: 1202 - protein, 115 aa, synthetic construct
LQLVESGGGLVQPGGSLRLTCAASGFTLDNYAIGWFRQAPGKEREGVSCISSSGGSTNYADSVKGRFTVSRDNAKQTVYLQMNSLKPEDTAVYYCAGVGDYGRRAMGQGTSVTVS

SEQ ID NO: 1203 - protein, 115 aa, synthetic construct
LQLVESGGGLVQPGGSLRLTCAASGFTLDNYAIGWFRQAPGKEREGVSSISSSGDSTHYADSVKGRFTVSRDNAKHTVYLQMNSLKPEDTAVYYCAGVGDYGRRAMGQGTSVTVS

SEQ ID NO: 1204 - protein, 115 aa, synthetic construct
LQLVESGGGLVQPGGSLRLTCAASGFTLDNYAIGWFRQAPGKEREGVSSISSSGGSTHYADSVKGRFTVSRDNAKHTVYLQMNSLKPEDTAVYYCAGVGDYGRRAMGQGTSVTVS

SEQ ID NO: 1205 - protein, 115 aa, synthetic construct
LQLVESGGGLVQPGGSLRLTCAASGFTLDNYAIGWFRQAPGKEREGVSSISSSGGSTIYADSVKGRFTVSRDNAKHTVYLQMNSLKPEDTAVYYCAGVGDYGRRAMGQGTSVTVS

SEQ ID NO: 1206 - protein, 115 aa, synthetic construct
LQLVESGGGLVQPGGSLRLTCAASGFTLDNYAIGWFRQAPGKEREGVSSISSSGGSTNYADSVKGRFSISRDNAKQTVYLQMNSLKPEDTAVYYCAGVGDYGRRAMGQGTSVTVS

SEQ ID NO: 1207 - protein, 115 aa, synthetic construct
LQLVESGGGLVQPGGSLRLTCAASGFTLDNYAIGWFRQAPGKEREGVSSISSSGGSTNYADSVKGRFTISRDNAKHTVYLQMNSLKPEDTAVYYCAGVGDYGRRAMGQGTSVTVS

SEQ ID NO: 1208 - protein, 115 aa, synthetic construct
LQLVESGGGLVQPGGSLRLTCAASGFTLDNYAIGWFRQAPGKEREGVSSISSSGGSTNYADSVKGRFTISRDNAKNTVYLQMNSLKPEDTAVYYCAAVGDYGRRAMGQGTSVTVS

SEQ ID NO: 1209 - protein, 115 aa, synthetic construct
LQLVESGGGLVQPGGSLRLTCAASGFTLDNYAIGWFRQAPGKEREGVSSISSSGGSTNYADSVKGRFTISRDNAKNTVYLQMNSLKPEDTAVYYCAGVGDYGRRAMGQGTSVTVS

SEQ ID NO: 1210 - protein, 115 aa, synthetic construct
LQLVESGGGLVQPGGSLRLTCAASGFTLDNYAIGWFRQAPGKEREGVSSISSSGGSTNYADSVKGRFTISRDNAKQTVYLQMNSLKPEDTAVYYCAGVGDYGRRAMGQGTSVTVS

SEQ ID NO: 1211 - protein, 115 aa, synthetic construct
LQLVESGGGLVQPGGSLRLTCAASGFTLDNYAIGWFRQAPGKEREGVSSISSSGGSTNYADSVKGRFTISRDYAKNTVYLQMDSLKPEDTAVYYCAGVGDYGRRAMGQGTSVTVS

SEQ ID NO: 1212 - protein, 115 aa, synthetic construct
LQLVESGGGLVQPGGSLRLTCAASGFTLDNYAIGWFRQAPGKEREGVSSISSSGGSTNYADSVKGRFTISRDYAKNTVYLQMNSLKPEDTAVYYCAGVGDYGRRAMGQGTSVTVS

SEQ ID NO: 1213 - protein, 115 aa, synthetic construct
LQLVESGGGLVQPGGSLRLTCAASGFTLDNYAIGWFRQAPGKEREGVSSISSSGGSTNYADSVKGRFTVSRDNAKHTVSLQMNSLKPEDTAVYYCAGVGDYGRRAMGQGTSVTVS

SEQ ID NO: 1214 - protein, 115 aa, synthetic construct
LQLVESGGGLVQPGGSLRLTCAASGFTLDNYAIGWFRQAPGKEREGVSSISSSGGSTNYADSVKGRFTVSRDNAKHTVYLHMNSLKPEDTAVYYCAGVGDYGRRAMGQGTSVTVS

SEQ ID NO: 1215 - protein, 115 aa, synthetic construct
LQLVESGGGLVQPGGSLRLTCAASGFTLDNYAIGWFRQAPGKEREGVSSISSSGGSTNYADSVKGRFTVSRDNAKHTVYLQINSLKPEDTAVYYCAGVGDYGRRAMGQGTSVTVS

SEQ ID NO: 1216 - protein, 115 aa, synthetic construct
LQLVESGGGLVQPGGSLRLTCAASGFTLDNYAIGWFRQAPGKEREGVSSISSSGGSTNYADSVKGRFTVSRDNAKHTVYLQMDSLKPEDTAVYYCAGVGDYGRRAMGQGTSVTVS

SEQ ID NO: 1217 - protein, 115 aa, synthetic construct
LQLVESGGGLVQPGGSLRLTCAASGFTLDNYAIGWFRQAPGKEREGVSSISSSGGSTNYADSVKGRFTVSRDNAKHTVYLQMNSLKPEDTAVYYCAADGDYGRRAMGQGTSVTVS

SEQ ID NO: 1218 - protein, 116 aa, synthetic construct
LQLVESGGGLVQPGGSLRLTCAASGFTLDNYAIGWFRQAPGKEREGVSSISSSGGSTNYADSVKGRFTVSRDNAKHTVYLQMNSLKPEDTAVYYCAAEDFGNSKTYWGQGTLVTVS

SEQ ID NO: 1219 - protein, 115 aa, synthetic construct
LQLVESGGGLVQPGGSLRLTCAASGFTLDNYAIGWFRQAPGKEREGVSSISSSGGSTNYADSVKGRFTVSRDNAKHTVYLQMNSLKPEDTAVYYCAAVGDYGRRAMGQGTSVTVS

SEQ ID NO: 1220 - protein, 115 aa, synthetic construct
LQLVESGGGLVQPGGSLRLTCAASGFTLDNYAIGWFRQAPGKEREGVSSISSSGGSTNYADSVKGRFTVSRDNAKHTVYLQMNSLKPEDTAVYYCAGVGDYGRRAMDQGTSVTVS

SEQ ID NO: 1221 - protein, 115 aa, synthetic construct
LQLVESGGGLVQPGGSLRLTCAASGFTLDNYAIGWFRQAPGKEREGVSSISSSGGSTNYADSVKGRFTVSRDNAKHTVYLQMNSLKPEDTAVYYCAGVGDYGRRAMGKGTSVTVS

SEQ ID NO: 1222 - protein, 115 aa, synthetic construct
LQLVESGGGLVQPGGSLRLTCAASGFTLDNYAIGWFRQAPGKEREGVSSISSSGGSTNYADSVKGRFTVSRDNAKHTVYLQMNSLKPEDTAVYYCAGVGDYGRRAMGPGTSVTVS

SEQ ID NO: 1223 - protein, 115 aa, synthetic construct
LQLVESGGGLVQPGGSLRLTCAASGFTLDNYAIGWFRQAPGKEREGVSSISSSGGSTNYADSVKGRFTVSRDNAKHTVYLQMNSLKPEDTAVYYCAGVGDYGRRAMGQGASVTVS

SEQ ID NO: 1224 - protein, 115 aa, synthetic construct
LQLVESGGGLVQPGGSLRLTCAASGFTLDNYAIGWFRQAPGKEREGVSSISSSGGSTNYADSVKGRFTVSRDNAKHTVYLQMNSLKPEDTAVYYCAGVGDYGRRAMGQGTPVTVS

SEQ ID NO: 1225 - protein, 115 aa, synthetic construct
LQLVESGGGLVQPGGSLRLTCAASGFTLDNYAIGWFRQAPGKEREGVSSISSSGGSTNYADSVKGRFTVSRDNAKHTVYLQMNSLKPEDTAVYYCAGVGDYGRRAMGQGTSVTVA

SEQ ID NO: 1226 - protein, 115 aa, synthetic construct
LQLVESGGGLVQPGGSLRLTCAASGFTLDNYAIGWFRQAPGKEREGVSSISSSGGSTNYADSVKGRFTVSRDNAKHTVYLQMNSLKPEDTAVYYCAGVGDYGRRAMGQGTSVTVP

SEQ ID NO: 1227 - protein, 115 aa, synthetic construct
LQLVESGGGLVQPGGSLRLTCAASGFTLDNYAIGWFRQAPGKEREGVSSISSSGGSTNYADSVKGRFTVSRDNAKHTVYLQMNSLKPEDTAVYYCAGVGDYGRRAMGQGTSVTVS

SEQ ID NO: 1228 - protein, 115 aa, synthetic construct
LQLVESGGGLVQPGGSLRLTCAASGFTLDNYAIGWFRQAPGKEREGVSSISSSGGSTNYADSVKGRFTVSRDNAKHTVYLQMNSLKPEDTAVYYCAGVGDYGRRAMGQGTTVTVS

SEQ ID NO: 1229 - protein, 115 aa, synthetic construct
LQLVESGGGLVQPGGSLRLTCAASGFTLDNYAIGWFRQAPGKEREGVSSISSSGGSTNYADSVKGRFTVSRDNAKHTVYLQMNSLKPEDTAVYYCAGVGDYGRRAMGQVTSVTVS

SEQ ID NO: 1230 - protein, 116 aa, synthetic construct
LQLVESGGGLVQPGGSLRLTCAASGFTLDNYAIGWFRQAPGKEREGVSSISSSGGSTNYADSVKGRFTVSRDNAKHTVYLQMNSLKSEDTAVYYCAAEDFGNSKTYWGQGTLVTVS

SEQ ID NO: 1231 - protein, 115 aa, synthetic construct
LQLVESGGGLVQPGGSLRLTCAASGFTLDNYAIGWFRQAPGKEREGVSSISSSGGSTNYADSVKGRFTVSRDNAKNTVYLQMNSLKPEDTAVYYCAAVGDYGRRAMGQGTSVTVS

SEQ ID NO: 1232 - protein, 115 aa, synthetic construct
LQLVESGGGLVQPGGSLRLTCAASGFTLDNYAIGWFRQAPGKEREGVSSISSSGGSTNYADSVKGRFTVSRDNAKNTVYLQMNSLKPEDTAVYYCAGVGDYGRRAMGQGTSVTVS

SEQ ID NO: 1233 - protein, 116 aa, synthetic construct
LQLVESGGGLVQPGGSLRLTCAASGFTLDNYAIGWFRQAPGKEREGVSSISSSGGSTNYADSVKGRFTVSRDNAKQTVYLQMNSLKPEDTAVYYCAAEDFGNSKTYWGQGTLVTVS

SEQ ID NO: 1234 - protein, 115 aa, synthetic construct
LQLVESGGGLVQPGGSLRLTCAASGFTLDNYAIGWFRQAPGKEREGVSSISSSGGSTNYADSVKGRFTVSRDNAKQTVYLQMNSLKPEDTAVYYCAAVGDYGRRAMGQGTSVTVS

SEQ ID NO: 1235 - protein, 115 aa, synthetic construct
LQLVESGGGLVQPGGSLRLTCAASGFTLDNYAIGWFRQAPGKEREGVSSISSSGGSTNYADSVKGRFTVSRDNAKQTVYLQMNSLKPEDTAVYYCAGVGDYGRRAMGPGTSVTVS

SEQ ID NO: 1236 - protein, 115 aa, synthetic construct
LQLVESGGGLVQPGGSLRLTCAASGFTLDNYAIGWFRQAPGKEREGVSSISSSGGSTNYADSVKGRFTVSRDNAKQTVYLQMNSLKPEDTAVYYCAGVGDYGRRAMGQGTPVTVS

SEQ ID NO: 1237 - protein, 115 aa, synthetic construct
LQLVESGGGLVQPGGSLRLTCAASGFTLDNYAIGWFRQAPGKEREGVSSISSSGGSTNYADSVKGRFTVSRDNAKQTVYLQMNSLKPEDTAVYYCAGVGDYGRRAMGQGTSVTVS

SEQ ID NO: 1238 - protein, 115 aa, synthetic construct
LQLVESGGGLVQPGGSLRLTCAASGFTLDNYAIGWFRQAPGKEREGVSSISSSGGSTNYADSVKGRFTVSRDNATHTVYLQMNSLKPEDTAVYYCAGVGDYGRRAMGQGTSVTVS

SEQ ID NO: 1239 - protein, 115 aa, synthetic construct
LQLVESGGGLVQPGGSLRLTCAASGFTLDNYAIGWFRQAPGKEREGVSSISSSGGSTNYADSVKGRFTVSRDNVKHTVYLQMNSLKPEDTAVYYCAGVGDYGRRAMGQGTSVTVS

SEQ ID NO: 1240 - protein, 115 aa, synthetic construct
LQLVESGGGLVQPGGSLRLTCAASGFTLDNYAIGWFRQAPGKEREGVSSISSSGGSTNYADSVKGRFTVSRDYAKHTVYLQMNSLKPEDTAVYYCAGVGDYGRRAMGQGTSVTVS

SEQ ID NO: 1241 - protein, 115 aa, synthetic construct
LQLVESGGGLVQPGGSLRLTCAASGFTLDNYAIGWFRQAPGKEREGVSSISSSGGSTNYADSVKGRFTVSRDYAKNTVYLQMDSLKPEDTAVYYCAGVGDYGRRAMGQGTSVTVS

SEQ ID NO: 1242 - protein, 115 aa, synthetic construct
LQLVESGGGLVQPGGSLRLTCAASGFTLDNYAIGWFRQAPGKEREGVSSISSSGGSTNYADSVKGRFTVSRDYAKNTVYLQMNSLKPEDTAVYYCAGVGDYGRRAMGQGTSVTVS

SEQ ID NO: 1243 - protein, 115 aa, synthetic construct
LQLVESGGGLVQPGGSLRLTCAASGFTLDNYAIGWFRQAPGKEREGVSSISSSGGSTNYADSVKGRFTVSRNNAKNSVYLQMNSLKPEDTAVYYCAGVGDYGRRAMGQGTSVTVS

SEQ ID NO: 1244 - protein, 115 aa, synthetic construct
LQLVESGGGLVQPGGSLRLTCAASGFTLDNYAIGWFRQAPGKEREGVSSISSSGGSTSYADSVKGRFTVSRDNAKQTVYLQMNSLKPEDTAVYYCAGVGDYGRRAMGQGTSVTVS

SEQ ID NO: 1245 - protein, 115 aa, synthetic construct
LQLVESGGGLVQPGGSLRLTCAASGFTLDNYAIGWFRQAPGKEREGVSSISSSGGSTTYADSVKGRFTISRDNAKHTVYLQMNSLKPEDTAVYYCAGVGDYGRRAMGQGTSVTVS

SEQ ID NO: 1246 - protein, 115 aa, synthetic construct
LQLVESGGGLVQPGGSLRLTCAASGFTLDNYAIGWFRQAPGKEREGVSSISSSGGSTTYADSVKGRFTVSRDNAKHTVYLQMNSLKPEDTAVYYCAGVGDYGRRAMGQGTSVTVS

SEQ ID NO: 1247 - protein, 115 aa, synthetic construct
LQLVESGGGLVQPGGSLRLTCAASGFTLDNYAIGWFRQAPGQEREGVSSISSSGGSTNYADSVKGRFTVSRDNAKHTVYLQMNSLKPEDTAVYYCAGVGDYGRRAMGQGTSVTVS

SEQ ID NO: 1248 - protein, 115 aa, synthetic construct
LQLVESGGGLVQPGGSLRLTCAASGFTLDNYAIGWFRQAPGQEREGVSSISSSGGSTNYADSVKGRFTVSRDNAKNTVYLQMNSLKPEDTAVYYCAGVGDYGRRAMGQGTSVTVS

SEQ ID NO: 1249 - protein, 115 aa, synthetic construct
LQLVESGGGLVQPGGSLRLTCAASGFTLDNYAIGWFRQAPGQEREGVSSISSSGGSTNYADSVKGRFTVSRDNAKQTVYLQMNSLKPEDTAVYYCAGVGDYGRRAMGQGTSVTVS

SEQ ID NO: 1250 - protein, 115 aa, synthetic construct
LQLVESGGGLVQPGGSLRLTCAASGFTLDNYAIGWFRQAPGREREGVSSISSSGGSTNYADSVKGRFTVSRDNAKHTVYLQMNSLKPEDTAVYYCAGVGDYGRRAMGQGTSVTVS

SEQ ID NO: 1251 - protein, 115 aa, synthetic construct
LQLVESGGGLVQPGGSLRLTCAASGFTLDNYAIGWFRQAPGTEREGVSSISSSGGSTNYADSVKGRFTVSRDNAKHTVYLQMNSLKPEDTAVYYCAGVGDYGRRAMGQGTSVTVS

SEQ ID NO: 1252 - protein, 115 aa, synthetic construct
LQLVESGGGLVQPGGSLRLTCAASGFTLDNYAIGWFRQAQGKEREGVSSISSSGGSTNYADSVKGRFTVSRDNAKHTVYLQMNSLKPEDTAVYYCAGVGDYGRRAMGQGTSVTVS

SEQ ID NO: 1253 - protein, 115 aa, synthetic construct
LQLVESGGGLVQPGGSLRLTCAASGFTLDNYAVGWFRQAPGKEREGVSSISSSGGSTNYADSVKGRFTVSRDNAKHTVYLQMNSLKPEDTAVYYCAGVGDYGRRAMGQGTSVTVS

SEQ ID NO: 1254 - protein, 115 aa, synthetic construct
LQLVESGGGLVQPGGSLRLTCAASGFTLDNYAVGWFRQAPGTEREGVSSISSSGGSTNYADSVKGRFTVSRDNAKHTVYLQMNSLKPEDTAVYYCAGVGDYGRRAMGQGTSVTVS

SEQ ID NO: 1255 - protein, 115 aa, synthetic construct
LQLVESGGGLVQPGGSLRLTCAASGFTLDSYAIGWFRQAPGKEREGVSSISSSGGSTNYADSVKGRFTVSRDNAKHTVYLQMNSLKPEDTAVYYCAAVGDYGRRAMGQGTSVTVS

SEQ ID NO: 1256 - protein, 115 aa, synthetic construct
LQLVESGGGLVQPGGSLRLTCAASGFTLDSYAIGWFRQAPGKEREGVSSISSSGGSTNYADSVKGRFTVSRDNAKHTVYLQMNSLKPEDTAVYYCAGVGDYGRRAMGQGTSVTVS

SEQ ID NO: 1257 - protein, 115 aa, synthetic construct
LQLVESGGGLVQPGGSLRLTCAASGFTLDSYAIGWFRQAPGKEREGVSSISSSGGSTNYADSVKGRFTVSRDNAKQTVYLQMNSLKPEDTAVYYCAGVGDYGRRAMGQGTSVTVS

SEQ ID NO: 1258 - protein, 115 aa, synthetic construct
LQLVESGGGLVQPGGSLRLTCAASGFTLDSYAVGWFRQAPGKEREGVSSISSSGGSTNYADSVKGRFTVSRDNAKHTVYLQMNSLKPEDTAVYYCAGVGDYGRRAMGQGTSVTVS

SEQ ID NO: 1259 - protein, 115 aa, synthetic construct
LQLVESGGGLVQPGGSLRLTCAASGFTLDSYAVGWFRQAPGTEREGVSSISSSGGSTNYADSVKGRFTVSRDNAKHTVYLQMNSLKPEDTAVYYCAGVGDYGRRAMGQGTSVTVS

SEQ ID NO: 1260 - protein, 115 aa, synthetic construct
LQLVESGGGLVQPGGSLRLTCAASGFTLDSYAVGWFRQAPGTEREGVSSISSSGGSTNYADSVKGRFTVSRDNAKNTVYLQMNSLKPEDTAVYYCAAVGDYGRRAMGQGTSVTVS

SEQ ID NO: 1261 - protein, 115 aa, synthetic construct
LQLVESGGGLVQPGGSLRLTCAASGFTLDSYAVGWFRQAPGTEREGVSSISSSGGSTNYADSVKGRFTVSRDNAKQTVYLQMNSLKPEDTAVYYCAGVGDYGRRAMGQGTSVTVS

SEQ ID NO: 1262 - protein, 115 aa, synthetic construct
LQLVESGGGLVQPGGSLRLTCAASGFTLDYYAIGWFRQAPGKEREGVSSISSSGGSTNYADSVKGRFTVSRDNAKHTVYLQMNSLKPEDTAVYYCAGVGDYGRRAMGQGTSVTVS

SEQ ID NO: 1263 - protein, 115 aa, synthetic construct
LQLVESGGGLVQPGGSLRLTCAASGFTLNYYAIGWFRQAPGKEREGVSSISSSGGSTNYADSVKGRFTISRDYAKHTVYLQMNSLKPEDTAVYYCAGVGDYGRRAMGQGTSVTVS

SEQ ID NO: 1264 - protein, 115 aa, synthetic construct
LQLVESGGGLVQPGGSLRLTCAASGFTLNYYAIGWFRQAPGKEREGVSSISSSGGSTNYADSVKGRFTVSRDNAKHTVYLQMNSLKPEDTAVYYCAGVGDYGRRAMGPGTSVTVS

SEQ ID NO: 1265 - protein, 115 aa, synthetic construct
LQLVESGGGLVQPGGSLRLTCAASGFTLNYYAIGWFRQAPGKEREGVSSISSSGGSTNYADSVKGRFTVSRDNAKHTVYLQMNSLKPEDTAVYYCAGVGDYGRRAMGQGTSVTVS

SEQ ID NO: 1266 - protein, 115 aa, synthetic construct
LQLVESGGGLVQPGGSLRLTCAASGFTLNYYAIGWFRQAPGKEREGVSSISSSGGSTNYADSVKGRFTVSRDNAKNTVYLQMNSLKPEDTAVYYCAAVGDYGRRAMGQGTSVTVS

SEQ ID NO: 1267 - protein, 115 aa, synthetic construct
LQLVESGGGLVQPGGSLRLTCAASGFTLNYYAIGWFRQAPGKEREGVSSISSSGGSTNYADSVKGRFTVSRDNAKQTVYLQMNSLKPEDTAVYYCAGVGDYGRRAMGQGTSVTVS

SEQ ID NO: 1268 - protein, 115 aa, synthetic construct
LQLVESGGGLVQPGGSLRLTCAASGFTLNYYAIGWFRQAPGQEREGVSSISSSGGSTNYADSVKGRFTVSRDNAKHTVYLQMNSLKPEDTAVYYCAGVGDYGRRAMGQGTSVTVS

SEQ ID NO: 1269 - protein, 115 aa, synthetic construct
LQLVESGGGLVQPGGSLRLTCAASGFTLNYYAIGWFRQAPGTEREGVSSISSSGGSTNYADSVKGRFTVSRDNAKHTVYLQMNSLKPEDTAVYYCAGVGDYGRRAMGQGTSVTVS

SEQ ID NO: 1270 - protein, 115 aa, synthetic construct
LQLVESGGGLVQPGGSLRLTCAASGLTLDNYAIGWFRQAPGKEREGVSSISSSGGSTNYADSVKGRFTVSRDNAKHTVYLQMNSLKPEDTAVYYCAGVGDYGRRAMGQGTSVTVS

SEQ ID NO: 1271 - protein, 115 aa, synthetic construct
LQLVESGGGLVQPGGSLRLTCAASGVTLDNYAIGWFRQAPGKEREGVSSISSSGGSTNYADSVKGRFTVSRDNAKHTVYLQMNSLKPEDTAVYYCAGVGDYGRRAMGQGTSVTVS

SEQ ID NO: 1272 - protein, 115 aa, synthetic construct
LQLVESGGGLVQPGGSLRLTCAASGVTLDNYAIGWFRQAPGKEREGVSSISSSGGSTNYADSVKGRFTVSRDNAKQTVYLQMNSLKPEDTAVYYCAGVGDYGRRAMGQGTSVTVS

SEQ ID NO: 1273 - protein, 115 aa, synthetic construct
LQLVESGGGLVQPGGSLRLTRAASGFTLDNYAIGWFRQAPGKEREGVSSISSSGGSTNYADSVKGRFTVSRDNAKHTVYLQMNSLKPEDTAVYYCAGVGDYGRRAMGQGTSVTVS

SEQ ID NO: 1274 - protein, 115 aa, synthetic construct
LQLVESGGKLVQPGGSLRLSCAASGFSLDSYAIGWFRQAPGQEREGVSSISSSGGSTNYADSVKGRFTVSRDNAKHTVYLQMNSLKPEDTAVYYCAGVGDYGRRAMGQGTSVTVS

SEQ ID NO: 1275 - protein, 115 aa, synthetic construct
LQLVESGGKLVQPGGSLRLSCAASGFTLDFYAIGWFRQAPGKEREGVSCISSSGGSTNYADSVKGRFTVSRDNAKHTVYLQMNSLKPEDTAVYYCAGVGDYGRRAMGQGTSVTVS

SEQ ID NO: 1276 - protein, 115 aa, synthetic construct
LQLVESGGKLVQPGGSLRLSCAASGFTLDFYAIGWFRQAPGKEREGVSSISSSGGSTNYADSVKGRFTVSRDNAKHTVYLQMNSLKPEDTAVYYCAAVGDYGRRAMGQGTSVTVS

SEQ ID NO: 1277 - protein, 115 aa, synthetic construct
LQLVESGGKLVQPGGSLRLSCAASGFTLDFYAIGWFRQAPGKEREGVSSISSSGGSTNYADSVKGRFTVSRDNAKHTVYLQMNSLKPEDTAVYYCAGVGDYGRRAMGQGTSVTVS

SEQ ID NO: 1278 - protein, 115 aa, synthetic construct
LQLVESGGKLVQPGGSLRLSCAASGFTLDFYAIGWFRQAPGKEREGVSSISSSGGSTNYADSVKGRFTVSRDNAKQTVYLQMNSLKPEDTAVYYCAGVGDYGRRAMGQGTSVTVS

SEQ ID NO: 1279 - protein, 115 aa, synthetic construct
LQLVESGGKLVQPGGSLRLSCAASGFTLDNYAIGWFRQAPGKEREGVSSISSSGGSTNYADSVKGRFTVSRDNAKHTVYLQMNSLKPEDTAVYYCAAVGDYGRRAMGQGTSVTVS

SEQ ID NO: 1280 - protein, 115 aa, synthetic construct
LQLVESGGKLVQPGGSLRLSCAASGFTLDNYAIGWFRQAPGKEREGVSSISSSGGSTNYADSVKGRFTVSRDNAKHTVYLQMNSLKPEDTAVYYCAGVGDYGRRAMGQGTSVTVS

SEQ ID NO: 1281 - protein, 115 aa, synthetic construct
LQLVESGGKLVQPGGSLRLSCAASGFTLDNYAIGWFRQAPGKEREGVSSISSSGGSTNYADSVKGRFTVSRDNAKNTVYLQMNSLKPEDTAVYYCAAVGDYGRRAMGQGTSVTVS

SEQ ID NO: 1282 - protein, 115 aa, synthetic construct
LQLVESGGKLVQPGGSLRLSCAASGFTLDNYAIGWFRQAPGKEREGVSSISSSGGSTNYADSVKGRFTVSRDNAKNTVYLQMNSLKPEDTAVYYCAGVGDYGRRAMGQGTSVTVS

SEQ ID NO: 1283 - protein, 115 aa, synthetic construct
LQLVESGGKLVQPGGSLRLSCAASGFTLDNYAIGWFRQAPGKEREGVSSISSSGGSTNYADSVKGRFTVSRDNAKQTVYLQMNSLKPEDTAVYYCAGVGDYGRRAMGQGTSVTVS

SEQ ID NO: 1284 - protein, 115 aa, synthetic construct
LQLVESGGKLVQPGGSLRLSCAASGFTLDSYAIGWFRQAPGKEREGVSSISSSGGSTNYADSVKGRFTVSRDNAKHTVYLQMNSLKPEDTAVYYCAGVGDYGRRAMGQGTSVTVS

SEQ ID NO: 1285 - protein, 115 aa, synthetic construct
LQLVESGGKLVQPGGSLRLSCAASGFTLDSYAVGWFRQAPGTEREGVSSISSSGGSTNYADSVKGRFTVSRDNAKHTVYLQMNSLKPEDTAVYYCAGVGDYGRRAMGQGTSVTVS

SEQ ID NO: 1286 - protein, 115 aa, synthetic construct
LQLVESGGKLVQPGGSLRLTCAASGFTLDNYAIGWFRQAPGKEREGVSSISSSGGSTNYADSVKGRFTVSRDNAKHTVYLQMNSLKPEDTAVYYCAGVGDYGRRAMGQGTSVTVS

SEQ ID NO: 1287 - protein, 115 aa, synthetic construct
LQLVESGGKLVQPGGSLRLTCAASGFTLDNYAIGWFRQAPGKEREGVSSISSSGGSTNYADSVKGRFTVSRDNAKNTVYLQMNSLKPEDTAVYYCAGVGDYGRRAMGQGTSVTVS

SEQ ID NO: 1288 - protein, 115 aa, synthetic construct
LQLVESGGKLVQPGGSLRLTCAASGFTLDNYAIGWFRQAPGKEREGVSSISSSGGSTNYADSVKGRFTVSRDNAKQTVYLQMNSLKPEDTAVYYCAGVGDYGRRAMGQGTSVTVS

SEQ ID NO: 1289 - protein, 115 aa, synthetic construct
LQLVESGRGLVQPGGSLRLSCAASGFTLDNYAIGWFRQAPGKEREGVSSISSSGGSTNYADSVKGRFTVSRDNAKHTVYLQMNSLKPEDTAVYYCAGVGDYGRRAMGQGTSVTVS

SEQ ID NO: 1290 - protein, 115 aa, synthetic construct
LQLVESGVGLVQPGGSLRLSCAASGFTLDNYAIGWFRQAPGKEREGVSSISSSGGSTNYADSVKGRFTVSRDNAKHTVYLQMNSLKPEDTAVYYCAGVGDYGRRAMGQGTSVTVS

SEQ ID NO: 1291 - protein, 115 aa, synthetic construct
LQLVESGVGLVQPGGSLRLSCAASGFTLDNYAIGWFRQAPGKEREGVSSISSSGGSTNYADSVKGRFTVSRDNAKQTVYLQMNSLKPEDTAVYYCAGVGDYGRRAMGQGTSVTVS

SEQ ID NO: 1292 - protein, 115 aa, synthetic construct
LQLVESVGGLVQPGGSLRLSCAASGFTLDNYAIGWFRQAPGKEREGVSSISSSGGSTNYADSVKGRFTVSRDNAKHTVYLQMNSLKPEDTAVYYCAGVGDYGRRAMGQGTSVTVS

SEQ ID NO: 1293 - protein, 115 aa, synthetic construct
LQLVKSGGGLVQPGGSLRLSCAASGFTLDNYAIGWFRQAPGKEREGVSSISSSGGSTNYADSVKGRFTVSRDNAKHTVYLQMNSLKPEDTAVYYCAGVGDYGRRAMGQGTSVTVS

SEQ ID NO: 1294 - protein, 115 aa, synthetic construct
LQLVKSGGGLVQPGGSLRLTCAASGFTLDNYAIGWFRQAPGKEREGVSSISSSGGSTNYADSVKGRFTVSRDNAKHTVYLQMNSLKPEDTAVYYCAGVGDYGRRAMGQGTSVTVS

SEQ ID NO: 1295 - protein, 113 aa, synthetic construct
LVESGGGLVQPGGSLRLSCAASGFTLDNYAIGWFRQAPGKEREGVSSISSSGGSTNYADSVKGRFTVSRDNAKHTVYLQMNSLKPEDTAVYYCAGVGDYGRRAMGQGTSVTVS

SEQ ID NO: 1296 - protein, 113 aa, synthetic construct
LVESGGGLVQPGGSLRLSCAASGFTLDNYAIGWFRQAPGKEREGVSSISSSGGSTNYADSVKGRFTVSRDNAKHTVYLQMNSLKPEDTAVYYCTGVGDYGRRAMGQGTSVTVS

SEQ ID NO: 1297 - protein, 113 aa, synthetic construct
LVESGGGLVQPGGSLRLSCAASGFTLDNYAIGWFRQAPGKEREGVSSISSSGGSTNYADSVKGRFTVSRDNAKQTVYLQMNSLKPEDTAVYYCAGVGDYGRRAMGQGTSVTVS

SEQ ID NO: 1298 - protein, 113 aa, synthetic construct
LVESGGGLVQPGGSLRLTCAASGFTLDNYAIGWFRQAPGKEREGVSSISSSGGSTNYADSVKGRFTVSRDNAKHTVYLQMNSLKPEDTAVYYCAGVGDYGRRAMGQGTSVTVS

SEQ ID NO: 1299 - protein, 114 aa, synthetic construct
QLVESGGGLVQPGGSLRLSCAASGFTLDNYAIGWFRQAPGKEREGVSSISSSGGSTNYADSVKGRFTVSRDNAKHTVYLQMNSLKPEDTAVYYCAGVGDYGRRAMGQGTSVTVS

SEQ ID NO: 1300 - protein, 112 aa, synthetic construct
VESGGGLVQPGGSLRLSCAASGFTLDNYAIGWFRQAPGKEREGVSSISSSGGSTNYADSVKGRFTVSRDNAKHTVYLQMNSLKPEDTAVYYCAGVGDYGRRAMGQGTSVTVS

SEQ ID NO: 1301 - protein, 112 aa, synthetic construct
VESGGGLVQPGGSLRLSCAASGFTLDNYAIGWFRQAPGKEREGVSSISSSGGSTNYADSVKGRFTVSRDNAKQTVYLQMNSLKPEDTAVYYCAGVGDYGRRAMGQGTSVTVS

SEQ ID NO: 1302 - protein, 115 aa, synthetic construct
VQLVESGGGLVQAGGSLRLSCAASGFTLDNYAIGWFRQAPGKEREGVSSISSSGGSTNYADSVKGRFTVSRDNAKHTVYLQMNSLKPEDTAVYYCAGVGDYGRRAMGQGTSVTVS

SEQ ID NO: 1303 - protein, 115 aa, synthetic construct
VQLVESGGGLVQPGGSLRLSCAASGFTLDNYAIGWFRQAPGKEREGVSSISSSGGSTNYADSVKGRFTVSRDNAKHTVYLQMNSLKPEDTAVYYCAGVGDYGRRAMGQGTSVTVS

SEQ ID NO: 1304 - protein, 115 aa, synthetic construct
VQLVESGGGLVQPGGSLRLSCAASGFTLDNYAIGWFRQAPGKEREGVSSISSSGGSTNYADSVKGRFTVSRDNAKNTVYLQMNSLKPEDTAVYYCAAVGDYGRRAMGQGTSVTVS

SEQ ID NO: 1305 - protein, 115 aa, synthetic construct
VQLVESGGGLVQPGGSLRLSCAASGFTLDNYAIGWFRQAPGKEREGVSSISSSGGSTNYADSVKGRFTVSRDNAKNTVYLQMNSLKPEDTAVYYCAGVGDYGRRAMGQGTSVTVS

SEQ ID NO: 1306 - protein, 115 aa, synthetic construct
VQLVESGGGLVQPGGSLRLSCAASGFTLDNYAIGWFRQAPGKEREGVSSISSSGGSTNYADSVKGRFTVSRDNAKQTVYLQMNSLKPEDTAVYYCAGVGDYGRRAMGQGTSVTVS

SEQ ID NO: 1307 - protein, 115 aa, synthetic construct
VQLVESGGGLVQPGGSLRLTCAASGFTLDNYAIGWFRQAPGKEREGVSSISSSGGSTNYADSVKGRFTVSRDNAKHTVYLQMNSLKPEDTAVYYCAGVGDYGRRAMGQGTSVTVS

SEQ ID NO: 1308 - protein, 120 aa, synthetic construct
EVQLVESGGGLVQAGGSLRLSCAASGRNFSSYPMGWFRQAPGKEREFVAAISWSGGNTYYADSVKGRFTISGDNAKNSVYLQMNSLKPEDTAVYICNERTTVLPTGAMDYWGQGTSVTVS

SEQ ID NO: 1309 - protein, 125 aa, synthetic construct
EVQLVESGGGLVQAGGSLRLSCAASGRNFSSYPMGWFRQAPGKEREFVAAISWSGGRTFYAASVKGRFTISRDTAKNTVYLQMNSLKPEDTAVYYCAAEGDDYIMVTTTGYGMDYWGQGTSVTVS

SEQ ID NO: 1310 - protein, 125 aa, synthetic construct
EVQLVESGGGLVQAGGSLRLSCAASGRNFSSYPMGWFRQAPGKEREFVAAISWSGGRTFYAASVKGRFTISRDTAKNTVYLQMNSLKPEDTAVYYCAAEGDDYIMVTTTGYVMDYWGQGTSVTVS

SEQ ID NO: 1311 - protein, 120 aa, synthetic construct
EVQLVESGGGLVQAGGSLRLSCAASGRTFSSYAMGWFRQSPGKEREFVAAISWSGGNTYYADSVKGRFTISGDNAKNSVYLQMNSLKPEDTAVYICNERTTVLPTGAMDYWGQGTSVTVS

SEQ ID NO: 1312 - protein, 125 aa, synthetic construct
EVQLVESGGGLVQAGGSLRLSCAASGRTFSSYAMGWFRQSPGKEREFVAAISWSGGNTYYADSVKGRFTISGDNAKNSVYLQMNSLKPEDTAVYYCAAEGDDYIMVTTTGYVMDYWGQGTSVTVS

SEQ ID NO: 1313 - protein, 125 aa, synthetic construct
EVQLVESGGGLVQAGGSLRLSCAASGRTFSSYAMGWFRQSPGKEREFVAAISWSGGRTFYAASVKGRFTISRDTAKNTVYLQMNSLKPEDTAVYYCAAEGDDYIMVTTTGYVMDYWGQGTSVTVS

SEQ ID NO: 1314 - protein, 125 aa, synthetic construct
EVQLVESGGGLVQAGGSLRLSCAASGRTFSSYPMGWFRQAPGKEREFVAAISWSGGRTFYAASVKGRFTISRDTAKNTVYLQMNSLKPEDTAVYYCAAEGDDYIMVTTTGYVMDYWGQGTSVTVS

SEQ ID NO: 1315 - protein, 125 aa, synthetic construct
EVQLVESGGGSVQAGGSLRLSCAASGRNFSSYPMGWFRQAPGKEREFVAAISWSGGRTFYAASVKGRFTISRDTAKNTVYLQMNSLKPEDTAVYYCAAEGDDYIMVTTTGYVMDYWGQGTSVTVS

SEQ ID NO: 1316 - protein, 124 aa, synthetic construct
LQLVESGGGLVQPGGSLRLSCAASGFTLDYYAIGWFRQAPGKEREFVAAISWSGGRTFYAASVKGRFTISRDTAKNTVYLQMNSLKPEDTAVYYCAAEGDDYIMVTTTGYVMDYWGQGTSVTVS

SEQ ID NO: 1317 - protein, 123 aa, synthetic construct
QLVESGGGLVQAGGSLRLSCAASGRNFSSYPMGWFRQAPGKEREFVAAISWSGGRTFYAASVKGRFTISRDTAKNTVYLQMNSLKPEDTAVYYCAAEGDDYIMVTTTGYVMDYWGQGTSVTVS

SEQ ID NO: 1318 - protein, 124 aa, synthetic construct
VQLVESGGGLVQAGGSLRLSCAASGLNFSSYPMGWFRQAPGKEREFVAAISWSGGRTFYAASVKGRFTISRDTAKNTVYLQMNSLKPEDTAVYYCAAEGDDYIMVTTTGYGMDYWGQGTSVTVS

SEQ ID NO: 1319 - protein, 124 aa, synthetic construct
VQLVESGGGLVQAGGSLRLSCAASGRNFSSYAMGWFRQAPGKEREFVAAISWSGGRTFYAASVKGRFTISRDTAKNTVYLQMNSLKPEDTAVYYCAAEGDDYIMVTTTGYVMDYWGQGTSVTVS

SEQ ID NO: 1320 - protein, 119 aa, synthetic construct
VQLVESGGGLVQAGGSLRLSCAASGRNFSSYAMGWFRQSPGKEREFVAAICWSGGNTYYADSVKGRFTISGDNAKNSVYLQMNSLKPEDTAVYICNERTTVLPTGAMDYWGQGTSVTVS

SEQ ID NO: 1321 - protein, 124 aa, synthetic construct
VQLVESGGGLVQAGGSLRLSCAASGRNFSSYAMGWFRQSPGKEREFVAAICWSGGNTYYADSVKGRFTISRDTAKNTVYLQMNSLKPEDTAVYYCAAEGDDYIMVTTTGYVMDYWGQGTSVTVS

SEQ ID NO: 1322 - protein, 119 aa, synthetic construct
VQLVESGGGLVQAGGSLRLSCAASGRNFSSYAMGWFRQSPGKEREFVAAISWSGGNTYYADSVKGRFTISGDNAKNSVYLQMNSLKPEDTAVYICNERTTVLPTGAMDYWGQGTSVTVS

SEQ ID NO: 1323 - protein, 124 aa, synthetic construct
VQLVESGGGLVQAGGSLRLSCAASGRNFSSYAMGWFRQSPGKEREFVAAISWSGGNTYYADSVKGRFTISGDNAKNSVYLQMNSLKPEDTAVYYCAAEGDDYIMVTTTGYVMDYWGQGTSVTVS

SEQ ID NO: 1324 - protein, 124 aa, synthetic construct
VQLVESGGGLVQAGGSLRLSCAASGRNFSSYAMGWFRQSPGKEREFVAAISWSGGNTYYADSVKGRFTISGDTAKNTVYLQMNSLKPEDTAVYYCAAEGDDYIMVTTTGYVMDYWGQGTSVTVS

SEQ ID NO: 1325 - protein, 124 aa, synthetic construct
VQLVESGGGLVQAGGSLRLSCAASGRNFSSYAMGWFRQSPGKEREFVAAISWSGGNTYYADSVKGRFTISRDTAKNTVYLQMNSLKPEDTAVYYCAAEGDDYIMVTTTGYVMDYWGQGTSVTVS

SEQ ID NO: 1326 - protein, 124 aa, synthetic construct
VQLVESGGGLVQAGGSLRLSCAASGRNFSSYAMGWFRQSPGKEREFVAAISWSGGRTFYAASVKGRFTISRDTAKNTVYLQMNSLKPEDTAVYYCAAEGDDYIMVTTTGYVMDYWGQGTSVTVS

SEQ ID NO: 1327 - protein, 124 aa, synthetic construct
VQLVESGGGLVQAGGSLRLSCAASGRNFSSYPMGWFRQAPGKERDFVAAISWSGGRTFYAASVKGRFTISRDTAKNTVYLQMNSLKPEDTAVYYCAAEGDDYIMVTTTGYVMDYWGQGTSVTVS

SEQ ID NO: 1328 - protein, 124 aa, synthetic construct
VQLVESGGGLVQAGGSLRLSCAASGRNFSSYPMGWFRQAPGKERDFVAAISWSGGRTFYAASVKGRFTISRDTAKNTVYLQMNSLKPEDTAVYYWAAEGDDYIMVTTTGYVMDYWGQGTSVTVS

SEQ ID NO: 1329 - protein, 119 aa, synthetic construct
VQLVESGGGLVQAGGSLRLSCAASGRNFSSYPMGWFRQAPGKEREFVAAICWSGGNTYYADSVKGRFTISGDNAKNSVYLQMNSLKPEDTAVYICNERTTVLPTGAMDYWGQGTSVTVS

SEQ ID NO: 1330 - protein, 124 aa, synthetic construct
VQLVESGGGLVQAGGSLRLSCAASGRNFSSYPMGWFRQAPGKEREFVAAICWSGGNTYYADSVKGRFTISGDNAKNTVYLQMNSLKPEDTAVYYCAAEGDDYIMVTTTGYVMDYWGQGTSVTVS

SEQ ID NO: 1331 - protein, 124 aa, synthetic construct
VQLVESGGGLVQAGGSLRLSCAASGRNFSSYPMGWFRQAPGKEREFVAAISWSGGNTYYAASVKGRFTISRDTAKNTVYLQMNSLKPEDTAVYYCAAEGDDYIMVTTTGYVMDYWGQGTSVTVS

SEQ ID NO: 1332 - protein, 119 aa, synthetic construct
VQLVESGGGLVQAGGSLRLSCAASGRNFSSYPMGWFRQAPGKEREFVAAISWSGGNTYYADSVKGRFTISGDNAKNSVYLQMNSLKPEDTAVYICNERTTVLPTGAMDYWGQGTSVTVS

SEQ ID NO: 1333 - protein, 119 aa, synthetic construct
VQLVESGGGLVQAGGSLRLSCAASGRNFSSYPMGWFRQAPGKEREFVAAISWSGGNTYYADSVKGRFTISGDNAKNSVYLQMNSLKPEDTAVYICNERTTVLPTGAMDYWGQGTTVTVS

SEQ ID NO: 1334 - protein, 124 aa, synthetic construct
VQLVESGGGLVQAGGSLRLSCAASGRNFSSYPMGWFRQAPGKEREFVAAISWSGGNTYYADSVKGRFTISGDNAKNSVYLQMNSLKPEDTAVYYCAAEGDDYIMVTTTGYVMDYWGQGTSVTVS

SEQ ID NO: 1335 - protein, 124 aa, synthetic construct
VQLVESGGGLVQAGGSLRLSCAASGRNFSSYPMGWFRQAPGKEREFVAAISWSGGNTYYADSVKGRFTISGDNAKNTVYLQMNSLKPEDTAVYYCAAEGDDYIMVTTTGYVMDYWGQGTSVTVS

SEQ ID NO: 1336 - protein, 117 aa, synthetic construct
VQLVESGGGLVQAGGSLRLSCAASGRNFSSYPMGWFRQAPGKEREFVAAISWSGGNTYYADSVKGRFTISGDNAKNTVYLQMNSLKPEDTGVYSCAAAGGYGNSSRYWGQGTSVTVS

SEQ ID NO: 1337 - protein, 124 aa, synthetic construct
VQLVESGGGLVQAGGSLRLSCAASGRNFSSYPMGWFRQAPGKEREFVAAISWSGGNTYYADSVKGRFTISRDTAKNTVYLQMNSLKPEDTAVYYCAAEGDDYIMVTTTGYVMDYWGQGTSVTVS

SEQ ID NO: 1338 - protein, 119 aa, synthetic construct
VQLVESGGGLVQAGGSLRLSCAASGRNFSSYPMGWFRQAPGKEREFVAAISWSGGRTFYAASVKGRFTISGDNAKNSVYLQMNSLKPEDTAVYICNERTTVLPTGAMDYWGQGTSVTVS

SEQ ID NO: 1339 - protein, 124 aa, synthetic construct
VQLVESGGGLVQAGGSLRLSCAASGRNFSSYPMGWFRQAPGKEREFVAAISWSGGRTFYAASVKGRFTISGDNAKNSVYLQMNSLKPEDTAVYYCAAEGDDYIMVTTTGYVMDYWGQGTSVTVS

SEQ ID NO: 1340 - protein, 124 aa, synthetic construct
VQLVESGGGLVQAGGSLRLSCAASGRNFSSYPMGWFRQAPGKEREFVAAISWSGGRTFYAASVKGRFTISGDTAKNTVYLQMNSLKPEDTAVYYCAAEGDDYIMVTTTGYVMDYWGQGTSVTVS

SEQ ID NO: 1341 - protein, 119 aa, synthetic construct
VQLVESGGGLVQAGGSLRLSCAASGRNFSSYPMGWFRQAPGKEREFVAAISWSGGRTFYAASVKGRFTISRDTAKNSVYLQMNSLKPEDTAVYICNERTTVLPTGAMDYWGQGTSVTVS

SEQ ID NO: 1342 - protein, 124 aa, synthetic construct
VQLVESGGGLVQAGGSLRLSCAASGRNFSSYPMGWFRQAPGKEREFVAAISWSGGRTFYAASVKGRFTISRDTAKNSVYLQMNSLKPEDTAVYYCAAEGDDYIMVTTTGYVMDYWGQGTSVTVS

SEQ ID NO: 1343 - protein, 119 aa, synthetic construct
VQLVESGGGLVQAGGSLRLSCAASGRNFSSYPMGWFRQAPGKEREFVAAISWSGGRTFYAASVKGRFTISRDTAKNTVYLQMNSLKPEDTAVYICNERTTVLPTGAMDYWGQGTSVTVS

SEQ ID NO: 1344 - protein, 111 aa, synthetic construct
VQLVESGGGLVQAGGSLRLSCAASGRNFSSYPMGWFRQAPGKEREFVAAISWSGGRTFYAASVKGRFTISRDTAKNTVYLQMNSLKPEDTAVYYCAADWPPGGQGTLVTVS

SEQ ID NO: 1345 - protein, 124 aa, synthetic construct
VQLVESGGGLVQAGGSLRLSCAASGRNFSSYPMGWFRQAPGKEREFVAAISWSGGRTFYAASVKGRFTISRDTAKNTVYLQMNSLKPEDTAVYYCAAEGDDYIMVTTTGYAMDYWGQGTSVTVS

SEQ ID NO: 1346 - protein, 124 aa, synthetic construct
VQLVESGGGLVQAGGSLRLSCAASGRNFSSYPMGWFRQAPGKEREFVAAISWSGGRTFYAASVKGRFTISRDTAKNTVYLQMNSLKPEDTAVYYCAAEGDDYIMVTTTGYGMDYWGQGTSVTVS

SEQ ID NO: 1347 - protein, 124 aa, synthetic construct
VQLVESGGGLVQAGGSLRLSCAASGRNFSSYPMGWFRQAPGKEREFVAAISWSGGRTFYAASVKGRFTISRDTAKNTVYLQMNSLKPEDTAVYYCAAEGDDYIMVTTTGYVMDYWGPGTSVTVS

SEQ ID NO: 1348 - protein, 124 aa, synthetic construct
VQLVESGGGLVQAGGSLRLSCAASGRNFSSYPMGWFRQAPGKEREFVAAISWSGGRTFYAASVKGRFTISRDTAKNTVYLQMNSLKPEDTAVYYCAAEGDDYIMVTTTGYVMDYWGQGASVTVS

SEQ ID NO: 1349 - protein, 124 aa, synthetic construct
VQLVESGGGLVQAGGSLRLSCAASGRNFSSYPMGWFRQAPGKEREFVAAISWSGGRTFYAASVKGRFTISRDTAKNTVYLQMNSLKPEDTAVYYCAAEGDDYIMVTTTGYVMDYWGQGTSDTVS

SEQ ID NO: 1350 - protein, 124 aa, synthetic construct
VQLVESGGGLVQAGGSLRLSCAASGRNFSSYPMGWFRQAPGKEREFVAAISWSGGRTFYAASVKGRFTISRDTAKNTVYLQMNSLKPEDTAVYYCAAEGDDYIMVTTTGYVMDYWGQGTSVTVS

SEQ ID NO: 1351 - protein, 124 aa, synthetic construct
VQLVESGGGLVQAGGSLRLSCAASGRNFSSYPMGWFRQAPGKEREFVAAISWSGGRTFYAASVKGRFTISRDTAKNTVYLQMNSLKPEDTAVYYCAAEGDDYIMVTTTGYVMDYWGQGTTVTVS

SEQ ID NO: 1352 - protein, 124 aa, synthetic construct
VQLVESGGGLVQAGGSLRLSCAASGRNFSSYPMGWFRQAPGKEREFVAAISWSGGRTFYAASVKGRFTISRDTAKNTVYLQMNSLKPEDTAVYYCAAEGDDYIMVTTTGYVMDYWGQVTSVTVS

SEQ ID NO: 1353 - protein, 124 aa, synthetic construct
VQLVESGGGLVQAGGSLRLSCAASGRNFSSYPMGWFRQAPGKEREFVAAISWSGGRTFYAASVKGRFTISRDTAKNTVYLQMNSLKPEDTAVYYCAAEGDDYITVTTTGYVMDYWGQGTSVTVS

SEQ ID NO: 1354 - protein, 124 aa, synthetic construct
VQLVESGGGLVQAGGSLRLSCAASGRNFSSYPMGWFRQAPGKEREFVAAISWSGGRTFYAASVKGRFTISRDTAKNTVYLQMNSLKPEDTAVYYWAAEGDDYIMVTTTGYGMDYWGQGTSVTVS

SEQ ID NO: 1355 - protein, 124 aa, synthetic construct
VQLVESGGGLVQAGGSLRLSCAASGRNFSSYPMGWFRQAPGKEREFVAAISWSGGRTFYAASVKGRFTISRDTAKNTVYLQMNSLKPEDTAVYYWAAEGDDYIMVTTTGYVMDYWGQGTSVTVS

SEQ ID NO: 1356 - protein, 117 aa, synthetic construct
VQLVESGGGLVQAGGSLRLSCAASGRNFSSYPMGWFRQAPGKEREFVAAISWSGGRTFYAASVKGRFTISRDTAKNTVYLQMNSLKPEDTGVYSCAAAGGYGNSSRYWGQGTSVTVS

SEQ ID NO: 1357 - protein, 124 aa, synthetic construct
VQLVESGGGLVQAGGSLRLSCAASGRNFSSYPMGWFRQAPGKEREFVAAISWSGGRTFYAASVKGRFTISRDTAKNTVYLQMNSLKPEDTSVYYCAAEGDDYIMVTTTGYVMDYWGQGTSVTVS

SEQ ID NO: 1358 - protein, 124 aa, synthetic construct
VQLVESGGGLVQAGGSLRLSCAASGRNFSSYPMGWFRQAPGKEREFVAAISWSGGRTFYAASVKGRFTISRDTAKNTVYLQMNTLKPEDTAVYYCAAEGDDYIMVTTTGYVMDYWGQGTSVTVS

SEQ ID NO: 1359 - protein, 124 aa, synthetic construct
VQLVESGGGLVQAGGSLRLSCAASGRNFSSYPMGWFRQAPGKEREFVAAISWSGGRTFYADSVKGRFTISGDNAKNSVYLQMNSLKPEDTAVYYCAAEGDDYIMVTTTGYVMDYWGQGTSVTVS

SEQ ID NO: 1360 - protein, 119 aa, synthetic construct
VQLVESGGGLVQAGGSLRLSCAASGRNFSSYPMGWFRQSPGKEREFVAAISWSGGNTYYADSVKGRFTISGDNAKNSVYLQMNSLKPEDTAVYICNERTTVLPTGAMDYWGQGTSVTVS

SEQ ID NO: 1361 - protein, 124 aa, synthetic construct
VQLVESGGGLVQAGGSLRLSCAASGRNFSSYPMGWFRQSPGKEREFVAAISWSGGNTYYADSVKGRFTISGDNAKNSVYLQMNSLKPEDTAVYYCAAEGDDYIMVTTTGYVMDYWGQGTSVTVS

SEQ ID NO: 1362 - protein, 124 aa, synthetic construct
VQLVESGGGLVQAGGSLRLSCAASGRNFSSYPMGWFRQSPGKEREFVAAISWSGGRTFYAASVKGRFTISRDTAKNTVYLQMNSLKPEDTAVYYCAAEGDDYIMVTTTGYVMDYWGQGTSVTVS

SEQ ID NO: 1363 - protein, 119 aa, synthetic construct
VQLVESGGGLVQAGGSLRLSCAASGRTFSSYAMGWFRQAPGKEREFVAAISWSGGNTYYADSVKGRFTISGDNAKNSVYLQMNSLKPEDTAVYICNERTTVLPTGAMDYWGQGTSVTVS

SEQ ID NO: 1364 - protein, 124 aa, synthetic construct
VQLVESGGGLVQAGGSLRLSCAASGRTFSSYAMGWFRQAPGKEREFVAAISWSGGNTYYADSVKGRFTISGDNAKNSVYLQMNSLKPEDTAVYYCAAEGDDYIMVTTTGYVMDYWGQGTSVTVS

SEQ ID NO: 1365 - protein, 119 aa, synthetic construct
VQLVESGGGLVQAGGSLRLSCAASGRTFSSYAMGWFRQAPGKEREFVAAISWSGGRTFYAASVKGRFTISRDTAKNTVYLQMNSLKPEDTAVYICNERTTVLPTGAMDYWGQGTSVTVS

SEQ ID NO: 1366 - protein, 124 aa, synthetic construct
VQLVESGGGLVQAGGSLRLSCAASGRTFSSYAMGWFRQAPGKEREFVAAISWSGGRTFYAASVKGRFTISRDTAKNTVYLQMNSLKPEDTAVYYCAAEGDDYIMVTTTGYGMDYWGQGTSVTVS

SEQ ID NO: 1367 - protein, 124 aa, synthetic construct
VQLVESGGGLVQAGGSLRLSCAASGRTFSSYAMGWFRQAPGKEREFVAAISWSGGRTFYAASVKGRFTISRDTAKNTVYLQMNSLKPEDTAVYYCAAEGDDYIMVTTTGYVMDYWGQGTSVTVS

SEQ ID NO: 1368 - protein, 124 aa, synthetic construct
VQLVESGGGLVQAGGSLRLSCAASGRTFSSYAMGWFRQSPGKERDFVAAISWSGGNTYYADSVKGRFTISGDNAKNSVYLQMNSLKPEDTAVYYCAAEGDDYIMVTTTGYVMDYWGQGTSVTVS

SEQ ID NO: 1369 - protein, 119 aa, synthetic construct
VQLVESGGGLVQAGGSLRLSCAASGRTFSSYAMGWFRQSPGKEREFVAAICWSGGNTYYADSVKGRFTISGDNAKNSVYLQMNSLKPEDTAVYICNERTTVLPTGAMDYWGQGTSVTVS

SEQ ID NO: 1370 - protein, 124 aa, synthetic construct
VQLVESGGGLVQAGGSLRLSCAASGRTFSSYAMGWFRQSPGKEREFVAAICWSGGNTYYADSVKGRFTISGDNAKNSVYLQMNSLKPEDTAVYYCAAEGDDYIMVTTTGYGMDYWGQGTSVTVS

SEQ ID NO: 1371 - protein, 124 aa, synthetic construct
VQLVESGGGLVQAGGSLRLSCAASGRTFSSYAMGWFRQSPGKEREFVAAICWSGGNTYYADSVKGRFTISGDNAKNSVYLQMNSLKPEDTAVYYCAAEGDDYIMVTTTGYVMDYWGQGTSVTVS

SEQ ID NO: 1372 - protein, 124 aa, synthetic construct
VQLVESGGGLVQAGGSLRLSCAASGRTFSSYAMGWFRQSPGKEREFVAAICWSGGNTYYADSVKGRFTISRDTAKNTVYLQMNSLKPEDTAVYYCAAEGDDYIMVTTTGYVMDYWGQGTSVTVS

SEQ ID NO: 1373 - protein, 124 aa, synthetic construct
VQLVESGGGLVQAGGSLRLSCAASGRTFSSYAMGWFRQSPGKEREFVAAICWSGGRTFYAASVKGRFTISRDTAKNTVYLQMNSLKPEDTAVYYCAAEGDDYIMVTTTGYVMDYWGQGTSVTVS

SEQ ID NO: 1374 - protein, 124 aa, synthetic construct
VQLVESGGGLVQAGGSLRLSCAASGRTFSSYAMGWFRQSPGKEREFVAAISWSGGNTYYAASVKGRFTISRDTAKNTVYLQMNSLKPEDTAVYYCAAEGDDYIMVTTTGYVMDYWGQGTSVTVS

SEQ ID NO: 1375 - protein, 119 aa, synthetic construct
VQLVESGGGLVQAGGSLRLSCAASGRTFSSYAMGWFRQSPGKEREFVAAISWSGGNTYYADSVKGRFTISGDNAKNSVYLQMNSLKPEDTAVYICNERTTVLPTGAMDYWGQGTSVTVS

SEQ ID NO: 1376 - protein, 124 aa, synthetic construct
VQLVESGGGLVQAGGSLRLSCAASGRTFSSYAMGWFRQSPGKEREFVAAISWSGGNTYYADSVKGRFTISGDNAKNSVYLQMNSLKPEDTAVYYCAAEGDDYIMVTTTGYAMDYWGQGTSVTVS

SEQ ID NO: 1377 - protein, 124 aa, synthetic construct
VQLVESGGGLVQAGGSLRLSCAASGRTFSSYAMGWFRQSPGKEREFVAAISWSGGNTYYADSVKGRFTISGDNAKNSVYLQMNSLKPEDTAVYYCAAEGDDYIMVTTTGYGMDYWGQGTSVTVS

SEQ ID NO: 1378 - protein, 124 aa, synthetic construct
VQLVESGGGLVQAGGSLRLSCAASGRTFSSYAMGWFRQSPGKEREFVAAISWSGGNTYYADSVKGRFTISGDNAKNSVYLQMNSLKPEDTAVYYCAAEGDDYIMVTTTGYVMDYWGQGTSVTVS

SEQ ID NO: 1379 - protein, 124 aa, synthetic construct
VQLVESGGGLVQAGGSLRLSCAASGRTFSSYAMGWFRQSPGKEREFVAAISWSGGNTYYADSVKGRFTISGDNAKNSVYLQMNSLKPEDTAVYYWAAEGDDYIMVTTTGYVMDYWGQGTSVTVS

SEQ ID NO: 1380 - protein, 119 aa, synthetic construct
VQLVESGGGLVQAGGSLRLSCAASGRTFSSYAMGWFRQSPGKEREFVAAISWSGGNTYYADSVKGRFTISGDNAKNTVYLQMNSLKPEDTAVYICNERTTVLPTGAMDYWGQGTSVTVS

SEQ ID NO: 1381 - protein, 124 aa, synthetic construct
VQLVESGGGLVQAGGSLRLSCAASGRTFSSYAMGWFRQSPGKEREFVAAISWSGGNTYYADSVKGRFTISGDNAKNTVYLQMNSLKPEDTAVYYCAAEGDDYIMVTTTGYVMDYWGQGTSVTVS

SEQ ID NO: 1382 - protein, 117 aa, synthetic construct
VQLVESGGGLVQAGGSLRLSCAASGRTFSSYAMGWFRQSPGKEREFVAAISWSGGNTYYADSVKGRFTISGDNAKNTVYLQMNSLKPEDTGVYSCAAAGGYGNSSRYWGQGTSVTVS

SEQ ID NO: 1383 - protein, 124 aa, synthetic construct
VQLVESGGGLVQAGGSLRLSCAASGRTFSSYAMGWFRQSPGKEREFVAAISWSGGNTYYADSVKGRFTISGDTAKNTVYLQMNSLKPEDTAVYYCAAEGDDYIMVTTTGYVMDYWGQGTSVTVS

SEQ ID NO: 1384 - protein, 119 aa, synthetic construct
VQLVESGGGLVQAGGSLRLSCAASGRTFSSYAMGWFRQSPGKEREFVAAISWSGGNTYYADSVKGRFTISRDTAKNTVYLQMNSLKPEDTAVYICNERTTVLPTGAMDYWGQGTSVTVS

SEQ ID NO: 1385 - protein, 124 aa, synthetic construct
VQLVESGGGLVQAGGSLRLSCAASGRTFSSYAMGWFRQSPGKEREFVAAISWSGGNTYYADSVKGRFTISRDTAKNTVYLQMNSLKPEDTAVYYCAAEGDDYIMVTTTGYVMDYWGQGTSVTVS

SEQ ID NO: 1386 - protein, 119 aa, synthetic construct
VQLVESGGGLVQAGGSLRLSCAASGRTFSSYAMGWFRQSPGKEREFVAAISWSGGRTFYAASVKGRFTISGDNAKNSVYLQMNSLKPEDTAVYICNERTTVLPTGAMDYWGQGTSVTVS

SEQ ID NO: 1387 - protein, 124 aa, synthetic construct
VQLVESGGGLVQAGGSLRLSCAASGRTFSSYAMGWFRQSPGKEREFVAAISWSGGRTFYAASVKGRFTISGDNAKNSVYLQMNSLKPEDTAVYYCAAEGDDYIMVTTTGYVMDYWGQGTSVTVS

SEQ ID NO: 1388 - protein, 119 aa, synthetic construct
VQLVESGGGLVQAGGSLRLSCAASGRTFSSYAMGWFRQSPGKEREFVAAISWSGGRTFYAASVKGRFTISRDTAKNTVYLQMNSLKPEDTAVYICNERTTVLPTGAMDYWGQGTSVTVS

SEQ ID NO: 1389 - protein, 124 aa, synthetic construct
VQLVESGGGLVQAGGSLRLSCAASGRTFSSYAMGWFRQSPGKEREFVAAISWSGGRTFYAASVKGRFTISRDTAKNTVYLQMNSLKPEDTAVYYCAAEGDDYIMVTTTGYGMDYWGQGTSVTVS

SEQ ID NO: 1390 - protein, 124 aa, synthetic construct
VQLVESGGGLVQAGGSLRLSCAASGRTFSSYAMGWFRQSPGKEREFVAAISWSGGRTFYAASVKGRFTISRDTAKNTVYLQMNSLKPEDTAVYYCAAEGDDYIMVTTTGYVMDYWGQGTSVTVS

SEQ ID NO: 1391 - protein, 124 aa, synthetic construct
VQLVESGGGLVQAGGSLRLSCAASGRTFSSYAMGWFRQSPGKEREFVAAISWSGGRTFYAASVKGRFTISRDTAKNTVYLQMNSLKPEDTAVYYCAAEGDDYIMVTTTGYVMDYWGQGTTVTVS

SEQ ID NO: 1392 - protein, 124 aa, synthetic construct
VQLVESGGGLVQAGGSLRLSCAASGRTFSSYPMGWFRQAPGKERDFVAAISWSGGRTFYAASVKGRFTISRDTAKNTVYLQMNSLKPEDTAVYYCAAEGDDYIMVTTTGYVMDYWGQGTSVTVS

SEQ ID NO: 1393 - protein, 119 aa, synthetic construct
VQLVESGGGLVQAGGSLRLSCAASGRTFSSYPMGWFRQAPGKEREFVAAISWSGGNTYYADSVKGRFTISGDNAKNSVYLQMNSLKPEDTAVYICNERTTVLPTGAMDYWGQGTSVTVS

SEQ ID NO: 1394 - protein, 124 aa, synthetic construct
VQLVESGGGLVQAGGSLRLSCAASGRTFSSYPMGWFRQAPGKEREFVAAISWSGGNTYYADSVKGRFTISRDTAKNTVYLQMNSLKPEDTAVYYCAAEGDDYIMVTTTGYVMDYWGQGTSVTVS

SEQ ID NO: 1395 - protein, 119 aa, synthetic construct
VQLVESGGGLVQAGGSLRLSCAASGRTFSSYPMGWFRQAPGKEREFVAAISWSGGRTFYAASVKGRFTISRDTAKNTVYLQMNSLKPEDTAVYICNERTTVLPTGAMDYWGQGTSVTVS

SEQ ID NO: 1396 - protein, 124 aa, synthetic construct
VQLVESGGGLVQAGGSLRLSCAASGRTFSSYPMGWFRQAPGKEREFVAAISWSGGRTFYAASVKGRFTISRDTAKNTVYLQMNSLKPEDTAVYYCAAEGDDYIMVTTTGYGMDYWGQGTSVTVS

SEQ ID NO: 1397 - protein, 124 aa, synthetic construct
VQLVESGGGLVQAGGSLRLSCAASGRTFSSYPMGWFRQAPGKEREFVAAISWSGGRTFYAASVKGRFTISRDTAKNTVYLQMNSLKPEDTAVYYCAAEGDDYIMVTTTGYVMDYWGQGTSVTVS

SEQ ID NO: 1398 - protein, 124 aa, synthetic construct
VQLVESGGGLVQAGGSLRLSCAASGRTFSSYPMGWFRQAPGKEREFVAAISWSGGRTFYAASVKGRFTISRDTAKNTVYLQMNSLKPEDTAVYYCAAEGDDYIMVTTTGYVMDYWGQGTTVTVS

SEQ ID NO: 1399 - protein, 119 aa, synthetic construct
VQLVESGGGLVQAGGSLRLSCAASGRTFSSYPMGWFRQSPGKEREFVAAISWSGGNTYYADSVKGRFTISGDNAKNSVYLQMNSLKPEDTAVYICNERTTVLPTGAMDYWGQGTSVTVS

SEQ ID NO: 1400 - protein, 124 aa, synthetic construct
VQLVESGGGLVQAGGSLRLSCVASGRNFSSYPMGWFRQAPGKEREFVAAISWSGGRTFYAASVKGRFTISRDTAKNTVYLQMNSLKPEDTAVYYCAAEGDDYIMVTTTGYVMDYWGQGTSVTVS

SEQ ID NO: 1401 - protein, 119 aa, synthetic construct
VQLVESGGGLVQAGGSLRLSCVASGRTFSSYAMGWFRQAPGKEREFVAAISWSGGNTYYADSVKGRFTISGDNAKNSVYLQMNSLKPEDTAVYICNERTTVLPTGAMDYWGQGTSVTVS

SEQ ID NO: 1402 - protein, 119 aa, synthetic construct
VQLVESGGGLVQAGGSLRLSCVASGRTFSSYAMGWFRQAPGKEREFVAAISWSGGRTFYAASVKGRFTISRDTAKNTVYLQMNSLKPEDTAVYICNERTTVLPTGAMDYWGQGTSVTVS

SEQ ID NO: 1403 - protein, 124 aa, synthetic construct
VQLVESGGGLVQAGGSLRLSCVASGRTFSSYAMGWFRQAPGKEREFVAAISWSGGRTFYAASVKGRFTISRDTAKNTVYLQMNSLKPEDTAVYYCAAEGDDYIMVTTTGYVMDYWGQGTSVTVS

SEQ ID NO: 1404 - protein, 119 aa, synthetic construct
VQLVESGGGLVQAGGSLRLSCVASGRTFSSYAMGWFRQSPGKEREFVAAICWSGGNTYYADSVKGRFTISGDNAKNSVYLQMNSLKPEDTAVYICNERTTVLPTGAMDYWGQGTSVTVS

SEQ ID NO: 1405 - protein, 124 aa, synthetic construct
VQLVESGGGLVQAGGSLRLSCVASGRTFSSYAMGWFRQSPGKEREFVAAICWSGGNTYYADSVKGRFTISGDNAKNSVYLQMNSLKPEDTAVYYCAAEGDDYIMVTTTGYVMDYWGQGTSVTVS

SEQ ID NO: 1406 - protein, 124 aa, synthetic construct
VQLVESGGGLVQAGGSLRLSCVASGRTFSSYAMGWFRQSPGKEREFVAAICWSGGNTYYADSVKGRFTISGDNAKNTVYLQMNSLKPEDTAVYYCAAEGDDYIMVTTTGYVMDYWGQGTSVTVS

SEQ ID NO: 1407 - protein, 117 aa, synthetic construct
VQLVESGGGLVQAGGSLRLSCVASGRTFSSYAMGWFRQSPGKEREFVAAICWSGGNTYYADSVKGRFTISGDNAKNTVYLQMNSLKPEDTGVYSCAAAGGYGNSSRYWGQGTSVTVS

SEQ ID NO: 1408 - protein, 124 aa, synthetic construct
VQLVESGGGLVQAGGSLRLSCVASGRTFSSYAMGWFRQSPGKEREFVAAICWSGGNTYYADSVKGRFTISRDTAKNTVYLQMNSLKPEDTAVYYCAAEGDDYIMVTTTGYVMDYWGQGTSVTVS

SEQ ID NO: 1409 - protein, 124 aa, synthetic construct
VQLVESGGGLVQAGGSLRLSCVASGRTFSSYAMGWFRQSPGKEREFVAAICWSGGRTFYAASVKGRFTISRDTAKNTVYLQMNSLKPEDTAVYYCAAEGDDYIMVTTTGYVMDYWGQGTSVTVS

SEQ ID NO: 1410 - protein, 119 aa, synthetic construct
VQLVESGGGLVQAGGSLRLSCVASGRTFSSYAMGWFRQSPGKEREFVAAISWSGGNTYYADSVKGRFTISGDNAKNSVYLQMNSLKPEDTAVYICNERTTVLPTGAMDYWGQGTSVTVS

SEQ ID NO: 1411 - protein, 124 aa, synthetic construct
VQLVESGGGLVQAGGSLRLSCVASGRTFSSYAMGWFRQSPGKEREFVAAISWSGGNTYYADSVKGRFTISGDNAKNSVYLQMNSLKPEDTAVYYCAAEGDDYIMVTTTGYVMDYWGQGTSVTVS

SEQ ID NO: 1412 - protein, 124 aa, synthetic construct
VQLVESGGGLVQAGGSLRLSCVASGRTFSSYAMGWFRQSPGKEREFVAAISWSGGNTYYADSVKGRFTISGDNAKNTVYLQMNSLKPEDTAVYYCAAEGDDYIMVTTTGYVMDYWGQGTSVTVS

SEQ ID NO: 1413 - protein, 124 aa, synthetic construct
VQLVESGGGLVQAGGSLRLSCVASGRTFSSYAMGWFRQSPGKEREFVAAISWSGGNTYYADSVKGRFTISRDTAKNTVYLQMNSLKPEDTAVYYCAAEGDDYIMVTTTGYVMDYWGQGTSVTVS

SEQ ID NO: 1414 - protein, 119 aa, synthetic construct
VQLVESGGGLVQAGGSLRLSCVASGRTFSSYAMGWFRQSPGKEREFVAAISWSGGRTFYAASVKGRFTISRDTAKNTVYLQMNSLKPEDTAVYICNERTTVLPTGAMDYWGQGTSVTVS

SEQ ID NO: 1415 - protein, 124 aa, synthetic construct
VQLVESGGGLVQAGGSLRLSCVASGRTFSSYAMGWFRQSPGKEREFVAAISWSGGRTFYAASVKGRFTISRDTAKNTVYLQMNSLKPEDTAVYYCAAEGDDYIMVTTTGYGMDYWGQGTSVTVS

SEQ ID NO: 1416 - protein, 124 aa, synthetic construct
VQLVESGGGLVQAGGSLRLSCVASGRTFSSYAMGWFRQSPGKEREFVAAISWSGGRTFYAASVKGRFTISRDTAKNTVYLQMNSLKPEDTAVYYCAAEGDDYIMVTTTGYVMDYWGQGTSVTVS

SEQ ID NO: 1417 - protein, 124 aa, synthetic construct
VQLVESGGGLVQAGGSLRLSCVASGRTFSSYPMGWFRQAPGKEREFVAAISWSGGRTFYAASVKGRFTISRDTAKNTVYLQMNSLKPEDTAVYYCAAEGDDYIMVTTTGYVMDYWGQGTSVTVS

SEQ ID NO: 1418 - protein, 124 aa, synthetic construct
VQLVESGGGLVQAGGSLRVSCAASGRNFSSYPMGWFRQAPGKEREFVAAISWSGGRTFYAASVKGRFTISRDTAKNTVYLQMNSLKPEDTAVYYCAAEGDDYIMVTTTGYVMDYWGQGTSVTVS

SEQ ID NO: 1419 - protein, 120 aa, synthetic construct
DVHLVESGGGLVQAGGSLRLSCAASGFPYFSCCMSWHRQAPGKDRELVSSISSDGSTHYADSVRGRFTISKGNARNTLYLQMNSLKPEDTAVYFCAASPRQLGPYYAMDYWGQGTSVTVS

SEQ ID NO: 1420 - protein, 120 aa, synthetic construct
DVKLVESGGGLVQAGGSLRLSCAASGFPYFSCCMSWHRQAPGKDRELVSSISSDGSTHYADSVRGRFTISKGNARNTLYLQMNSLKPEDTAVYFCAASPRQLGPYYAMDYWGQGTSVTVS

SEQ ID NO: 1421 - protein, 120 aa, synthetic construct
DVQLVESGGGLVQAGGALRLSCAASGFPYFSCCMSWHRQAPGKDRELVSSISSDGSTHYADSVRGRFTISKGNARNTLYLQMNSLKPEDTAVYFCAASPRQLGPYYAMDYWGQGTSVTVS

SEQ ID NO: 1422 - protein, 120 aa, synthetic construct
DVQLVESGGGLVQAGGSLRLSCAASGFPYFSCCMIWHRQAPGKDRELVSSISSDGSTHYADSVRGRFTISKGNARNTLYLQMNSLKPEDTAVYFCAASPRQLGPYYAMDYWGQGTSVTVS

SEQ ID NO: 1423 - protein, 120 aa, synthetic construct
DVQLVESGGGLVQAGGSLRLSCAASGFPYFSCCMRWHRQAPGKDRELVSSISSDGSTHYADSVRGRFTISKGNARNTLYLQMNSLKPEDTAVYFCAASPRQLGPYYAMDYWGQGTSVTVS

SEQ ID NO: 1424 - protein, 116 aa, synthetic construct
DVQLVESGGGLVQAGGSLRLSCAASGFPYFSCCMSWHRQAPGKDRELFSSISSDGSTHYADSVRGRFTISKGNARNTLYLQMNSLKPEDTAMYSCIYCRYDGEFAYWGQGTLVTVS

SEQ ID NO: 1425 - protein, 120 aa, synthetic construct
DVQLVESGGGLVQAGGSLRLSCAASGFPYFSCCMSWHRQAPGKDRELVPSISSDGSTHYADSVRGRFTISKGNARNTLYLQMNSLKPEDTAVYFCAASPRQLGPYYAMDYWGQGTSVTVS

SEQ ID NO: 1426 - protein, 120 aa, synthetic construct
DVQLVESGGGLVQAGGSLRLSCAASGFPYFSCCMSWHRQAPGKDRELVSSISSDGSTHYADRVRGRFTISKGNARNTLYLQMNSLKPEDTAVYFCAASPRQLGPYYAMDYWGQGTSVTVS

SEQ ID NO: 1427 - protein, 120 aa, synthetic construct
DVQLVESGGGLVQAGGSLRLSCAASGFPYFSCCMSWHRQAPGKDRELVSSISSDGSTHYADSARGRFTISKGNARNTLYLQMNSLKPEDTAVYFCAASPRQLGPYYAMDYWGQGTSVTVS

SEQ ID NO: 1428 - protein, 120 aa, synthetic construct
DVQLVESGGGLVQAGGSLRLSCAASGFPYFSCCMSWHRQAPGKDRELVSSISSDGSTHYADSVKGRFTISKGNARNTLYLQMNSLKPEDTAVYFCAASPRQLGPYYAMDYWGQGTSVTVS

SEQ ID NO: 1429 - protein, 115 aa, synthetic construct
DVQLVESGGGLVQAGGSLRLSCAASGFPYFSCCMSWHRQAPGKDRELVSSISSDGSTHYADSVKGRFTISRDNAKNTVYLQMNSLKPEDTAVYYCNGGWSLAMDYWGQGTSVTVS

SEQ ID NO: 1430 - protein, 115 aa, synthetic construct
DVQLVESGGGLVQAGGSLRLSCAASGFPYFSCCMSWHRQAPGKDRELVSSISSDGSTHYADSVKGRFTVSRDNAKHTVYLQMNSLKPEDTAVYYCAGVGDYGRRAMGQGTSVTVS

SEQ ID NO: 1431 - protein, 120 aa, synthetic construct
DVQLVESGGGLVQAGGSLRLSCAASGFPYFSCCMSWHRQAPGKDRELVSSISSDGSTHYADSVRGRFPISKGNARNTLYLQMNSLKPEDTAVYFCAASPRQLGPYYAMDYWGQGTSVTVS

SEQ ID NO: 1432 - protein, 120 aa, synthetic construct
DVQLVESGGGLVQAGGSLRLSCAASGFPYFSCCMSWHRQAPGKDRELVSSISSDGSTHYADSVRGRFTIPKGNARNTLYLQMNSLKPEDTAVYFCAASPRQLGPYYAMDYWGQGTSVTVS

SEQ ID NO: 1433 - protein, 120 aa, synthetic construct
DVQLVESGGGLVQAGGSLRLSCAASGFPYFSCCMSWHRQAPGKDRELVSSISSDGSTHYADSVRGRFTISKENARNTLYLQMNSLKPEDTAVYFCAASPRQLGPYYAMDYWGQGTSVTVS

SEQ ID NO: 1434 - protein, 115 aa, synthetic construct
DVQLVESGGGLVQAGGSLRLSCAASGFPYFSCCMSWHRQAPGKDRELVSSISSDGSTHYADSVRGRFTISKGNAKHTVYLQMNSLKPEDTAVYYCAGVGDYGRRAMGQGTSVTVS

SEQ ID NO: 1435 - protein, 120 aa, synthetic construct
DVQLVESGGGLVQAGGSLRLSCAASGFPYFSCCMSWHRQAPGKDRELVSSISSDGSTHYADSVRGRFTISKGNARNALYLQMNSLKPEDTAVYFCAASPRQLGPYYAMDYWGQGTSVTVS

SEQ ID NO: 1436 - protein, 120 aa, synthetic construct
DVQLVESGGGLVQAGGSLRLSCAASGFPYFSCCMSWHRQAPGKDRELVSSISSDGSTHYADSVRGRFTISKGNARNTISLQMNSLKPEDTAVYFCAASPRQLGPYYAMDYWGQGTSVTVS

SEQ ID NO: 1437 - protein, 120 aa, synthetic construct
DVQLVESGGGLVQAGGSLRLSCAASGFPYFSCCMSWHRQAPGKDRELVSSISSDGSTHYADSVRGRFTISKGNARNTIYLQMNSLKPEDTAVYFCAASPRQLGPYYAMDYWGQGTSVTVS

SEQ ID NO: 1438 - protein, 120 aa, synthetic construct
DVQLVESGGGLVQAGGSLRLSCAASGFPYFSCCMSWHRQAPGKDRELVSSISSDGSTHYADSVRGRFTISKGNARNTIYLQMNSLKPEDTAVYFCAAYPRQLGPYYAMDYWGQGTSVTVS

SEQ ID NO: 1439 - protein, 120 aa, synthetic construct
DVQLVESGGGLVQAGGSLRLSCAASGFPYFSCCMSWHRQAPGKDRELVSSISSDGSTHYADSVRGRFTISKGNARNTLNLQMNSLKPEDTAVYFCAASPRQLGPYYAMDYWGQGTSVTVS

SEQ ID NO: 1440 - protein, 120 aa, synthetic construct
DVQLVESGGGLVQAGGSLRLSCAASGFPYFSCCMSWHRQAPGKDRELVSSISSDGSTHYADSVRGRFTISKGNARNTLSLQMNSLKPEDTAVYFCAASPRQLGPYYAMDYWGQGTSVTVS

SEQ ID NO: 1441 - protein, 120 aa, synthetic construct
DVQLVESGGGLVQAGGSLRLSCAASGFPYFSCCMSWHRQAPGKDRELVSSISSDGSTHYADSVRGRFTISKGNARNTLYLPMNSLKPEDTAVYFCAASPRQLGPYYAMDYWGQGTSVTVS

SEQ ID NO: 1442 - protein, 120 aa, synthetic construct
DVQLVESGGGLVQAGGSLRLSCAASGFPYFSCCMSWHRQAPGKDRELVSSISSDGSTHYADSVRGRFTISKGNARNTLYLQMNRLKPEDTAVYFCAASPRQLGPYYAMDYWGQGTSVTVS

SEQ ID NO: 1443 - protein, 120 aa, synthetic construct
DVQLVESGGGLVQAGGSLRLSCAASGFPYFSCCMSWHRQAPGKDRELVSSISSDGSTHYADSVRGRFTISKGNARNTLYLQMNSLKPEDPAVYFCAASPRQLGPYYAMDYWGQGTSVTVS

SEQ ID NO: 1444 - protein, 120 aa, synthetic construct
DVQLVESGGGLVQAGGSLRLSCAASGFPYFSCCMSWHRQAPGKDRELVSSISSDGSTHYADSVRGRFTISKGNARNTLYLQMNSLKPEDTAGYFCAASPRQLGPYYAMDYWGQGTSVTVS

SEQ ID NO: 1445 - protein, 120 aa, synthetic construct
DVQLVESGGGLVQAGGSLRLSCAASGFPYFSCCMSWHRQAPGKDRELVSSISSDGSTHYADSVRGRFTISKGNARNTLYLQMNSLKPEDTAVYFCAASPRHLGPYYAMDYWGQGTSVTVS

SEQ ID NO: 1446 - protein, 120 aa, synthetic construct
DVQLVESGGGLVQAGGSLRLSCAASGFPYFSCCMSWHRQAPGKDRELVSSISSDGSTHYADSVRGRFTISKGNARNTLYLQMNSLKPEDTAVYFCAASPRKLGPYYAMDYWGQGTSVTVS

SEQ ID NO: 1447 - protein, 120 aa, synthetic construct
DVQLVESGGGLVQAGGSLRLSCAASGFPYFSCCMSWHRQAPGKDRELVSSISSDGSTHYADSVRGRFTISKGNARNTLYLQMNSLKPEDTAVYFCAASPRQHGPYYAMDYWGQGTSVTVS

SEQ ID NO: 1448 - protein, 120 aa, synthetic construct
DVQLVESGGGLVQAGGSLRLSCAASGFPYFSCCMSWHRQAPGKDRELVSSISSDGSTHYADSVRGRFTISKGNARNTLYLQMNSLKPEDTAVYFCAASPRQLGPYYAIDYWGQGTSVTVS

SEQ ID NO: 1449 - protein, 120 aa, synthetic construct
DVQLVESGGGLVQAGGSLRLSCAASGFPYFSCCMSWHRQAPGKDRELVSSISSDGSTHYADSVRGRFTISKGNARNTLYLQMNSLKPEDTAVYFCAASPRQLGPYYAMDYLGQGTSVTVS

SEQ ID NO: 1450 - protein, 120 aa, synthetic construct
DVQLVESGGGLVQAGGSLRLSCAASGFPYFSCCMSWHRQAPGKDRELVSSISSDGSTHYADSVRGRFTISKGNARNTLYLQMNSLKPEDTAVYFCAASPRQLGPYYAMDYSGQGTSVTVS

SEQ ID NO: 1451 - protein, 120 aa, synthetic construct
DVQLVESGGGLVQAGGSLRLSCAASGFPYFSCCMSWHRQAPGKDRELVSSISSDGSTHYADSVRGRFTISKGNARNTLYLQMNSLKPEDTAVYFCAASPRQLGPYYAMDYWDQGTSVTVS

SEQ ID NO: 1452 - protein, 120 aa, synthetic construct
DVQLVESGGGLVQAGGSLRLSCAASGFPYFSCCMSWHRQAPGKDRELVSSISSDGSTHYADSVRGRFTISKGNARNTLYLQMNSLKPEDTAVYFCAASPRQLGPYYAMDYWGHGTSVTVS

SEQ ID NO: 1453 - protein, 120 aa, synthetic construct
DVQLVESGGGLVQAGGSLRLSCAASGFPYFSCCMSWHRQAPGKDRELVSSISSDGSTHYADSVRGRFTISKGNARNTLYLQMNSLKPEDTAVYFCAASPRQLGPYYAMDYWGPGTSVTVS

SEQ ID NO: 1454 - protein, 120 aa, synthetic construct
DVQLVESGGGLVQAGGSLRLSCAASGFPYFSCCMSWHRQAPGKDRELVSSISSDGSTHYADSVRGRFTISKGNARNTLYLQMNSLKPEDTAVYFCAASPRQLGPYYAMDYWGQGASVTVS

SEQ ID NO: 1455 - protein, 120 aa, synthetic construct
DVQLVESGGGLVQAGGSLRLSCAASGFPYFSCCMSWHRQAPGKDRELVSSISSDGSTHYADSVRGRFTISKGNARNTLYLQMNSLKPEDTAVYFCAASPRQLGPYYAMDYWGQGTLVTVS

SEQ ID NO: 1456 - protein, 120 aa, synthetic construct
DVQLVESGGGLVQAGGSLRLSCAASGFPYFSCCMSWHRQAPGKDRELVSSISSDGSTHYADSVRGRFTISKGNARNTLYLQMNSLKPEDTAVYFCAASPRQLGPYYAMDYWGQGTPVTVS

SEQ ID NO: 1457 - protein, 120 aa, synthetic construct
DVQLVESGGGLVQAGGSLRLSCAASGFPYFSCCMSWHRQAPGKDRELVSSISSDGSTHYADSVRGRFTISKGNARNTLYLQMNSLKPEDTAVYFCAASPRQLGPYYAMDYWGQGTSATVS

SEQ ID NO: 1458 - protein, 120 aa, synthetic construct
DVQLVESGGGLVQAGGSLRLSCAASGFPYFSCCMSWHRQAPGKDRELVSSISSDGSTHYADSVRGRFTISKGNARNTLYLQMNSLKPEDTAVYFCAASPRQLGPYYAMDYWGQGTTVTVS

SEQ ID NO: 1459 - protein, 120 aa, synthetic construct
DVQLVESGGGLVQAGGSLRLSCAASGFPYFSCCMSWHRQAPGKDRELVSSISSDGSTHYADSVRGRFTISKGNARNTLYLQMNSLKPEDTAVYFCAASPRQLGPYYAMDYWGQVTSVTVS

SEQ ID NO: 1460 - protein, 120 aa, synthetic construct
DVQLVESGGGLVQAGGSLRLSCAASGFPYFSCCMSWHRQAPGKDRELVSSISSDGSTHYADSVRGRFTISKGNARNTLYLQMNSLKPEDTAVYFCAASPRQLGPYYAMDYWGRGTSVTVS

SEQ ID NO: 1461 - protein, 120 aa, synthetic construct
DVQLVESGGGLVQAGGSLRLSCAASGFPYFSCCMSWHRQAPGKDRELVSSISSDGSTHYADSVRGRFTISKGNARNTLYLQMNSLKPEDTAVYFCAASPRQLRPYYAMDYWGQGTSVTVS

SEQ ID NO: 1462 - protein, 120 aa, synthetic construct
DVQLVESGGGLVQAGGSLRLSCAASGFPYFSCCMSWHRQAPGKDRELVSSISSDGSTHYADSVRGRFTISKGNARNTLYLQMNSLKPEDTAVYFCAASPRQLWPYYAMDYWGQGTSVTVS

SEQ ID NO: 1463 - protein, 120 aa, synthetic construct
DVQLVESGGGLVQAGGSLRLSCAASGFPYFSCCMSWHRQAPGKDRELVSSISSDGSTHYADSVRGRFTISKGNARNTLYLQMNSLKPEDTAVYFCAASPRQRGPYYAMDYWGQGTSVTVS

SEQ ID NO: 1464 - protein, 120 aa, synthetic construct
DVQLVESGGGLVQAGGSLRLSCAASGFPYFSCCMSWHRQAPGKDRELVSSISSDGSTHYADSVRGRFTISKGNARNTLYLQMNSLKPEDTAVYFCAASPRRLGPYYAMDYWGQGTSVTVS

SEQ ID NO: 1465 - protein, 120 aa, synthetic construct
DVQLVESGGGLVQAGGSLRLSCAASGFPYFSCCMSWHRQAPGKDRELVSSISSDGSTHYADSVRGRFTISKGNARNTLYLQMNSLKPEDTAVYFCAASPTQLGPYYAMDYWGQGTSVTVS

SEQ ID NO: 1466 - protein, 120 aa, synthetic construct
DVQLVESGGGLVQAGGSLRLSCAASGFPYFSCCMSWHRQAPGKDRELVSSISSDGSTHYADSVRGRFTISKGNARNTLYLQMNSLKPEDTAVYFCAAYPRQLGPYYAMDYWGQGTSVTVS

SEQ ID NO: 1467 - protein, 120 aa, synthetic construct
DVQLVESGGGLVQAGGSLRLSCAASGFPYFSCCMSWHRQAPGKDRELVSSISSDGSTHYADSVRGRFTISKGNARNTLYLQMNSLKPEDTAVYFCATSPRQLGPYYAMDYWGQGTSVTVS

SEQ ID NO: 1468 - protein, 120 aa, synthetic construct
DVQLVESGGGLVQAGGSLRLSCAASGFPYFSCCMSWHRQAPGKDRELVSSISSDGSTHYADSVRGRFTISKGNARNTLYLQMNSLKPEDTAVYFYAASPRQLGPYYAMDYWGQGTSVTVS

SEQ ID NO: 1469 - protein, 120 aa, synthetic construct
DVQLVESGGGLVQAGGSLRLSCAASGFPYFSCCMSWHRQAPGKDRELVSSISSDGSTHYADSVRGRFTISKGNARNTLYLQMNSLKPEDTAVYLCAASPRQLGPYYAMDYWGQGTSVTVS

SEQ ID NO: 1470 - protein, 120 aa, synthetic construct
DVQLVESGGGLVQAGGSLRLSCAASGFPYFSCCMSWHRQAPGKDRELVSSISSDGSTHYADSVRGRFTISKGNARNTLYLQMNSLKPEDTAVYSCAASPRQLGPYYAMDYWGQGTSVTVS

SEQ ID NO: 1471 - protein, 120 aa, synthetic construct
DVQLVESGGGLVQAGGSLRLSCAASGFPYFSCCMSWHRQAPGKDRELVSSISSDGSTHYADSVRGRFTISKGNARNTLYLQMNSLKPEDTAVYVCAASPRQLGPYYAMDYWGQGTSVTVS

SEQ ID NO: 1472 - protein, 120 aa, synthetic construct
DVQLVESGGGLVQAGGSLRLSCAASGFPYFSCCMSWHRQAPGKDRELVSSISSDGSTHYADSVRGRFTISKGNARNTLYLQMNSLKPEDTAVYYCAASPRQLGPYYAMDYWGQGTSVTVS

SEQ ID NO: 1473 - protein, 120 aa, synthetic construct
DVQLVESGGGLVQAGGSLRLSCAASGFPYFSCCMSWHRQAPGKDRELVSSISSDGSTHYADSVRGRFTISKGNARNTLYLQMNSLKPGDTAVYFCAASPRQLGPYYAMDYWGQGTSVTVS

SEQ ID NO: 1474 - protein, 120 aa, synthetic construct
DVQLVESGGGLVQAGGSLRLSCAASGFPYFSCCMSWHRQAPGKDRELVSSISSDGSTHYADSVRGRFTISKGNARNTLYLQMNSLKPKDTAVYFCAASPRQLGPYYAMDYWGQGTSVTVS

SEQ ID NO: 1475 - protein, 120 aa, synthetic construct
DVQLVESGGGLVQAGGSLRLSCAASGFPYFSCCMSWHRQAPGKDRELVSSISSDGSTHYADSVRGRFTISKGNARNTLYLQMNSPKPEDTAVYFCAASPRQLGPYYAMDYWGQGTSVTVS

SEQ ID NO: 1476 - protein, 120 aa, synthetic construct
DVQLVESGGGLVQAGGSLRLSCAASGFPYFSCCMSWHRQAPGKDRELVSSISSDGSTHYADSVRGRFTISKGNARNTLYLQMTSLKPEDTAVYFCAASPRQLGPYYAMDYWGQGTSVTVS

SEQ ID NO: 1477 - protein, 120 aa, synthetic construct
DVQLVESGGGLVQAGGSLRLSCAASGFPYFSCCMSWHRQAPGKDRELVSSISSDGSTHYADSVRGRFTISKGNARNTLYLQTNSLKPEDTAVYFCAASPRQLGPYYAMDYWGQGTSVTVS

SEQ ID NO: 1478 - protein, 120 aa, synthetic construct
DVQLVESGGGLVQAGGSLRLSCAASGFPYFSCCMSWHRQAPGKDRELVSSISSDGSTHYADSVRGRFTISKGNARNTLYPQMNSLKPEDTAVYFCAASPRQLGPYYAMDYWGQGTSVTVS

SEQ ID NO: 1479 - protein, 120 aa, synthetic construct
DVQLVESGGGLVQAGGSLRLSCAASGFPYFSCCMSWHRQAPGKDRELVSSISSDGSTHYADSVRGRFTISKGNARNTLYPQMNSLKPEDTAVYFCAASPRQRGPYYAMDYWGQGTSVTVS

SEQ ID NO: 1480 - protein, 120 aa, synthetic construct
DVQLVESGGGLVQAGGSLRLSCAASGFPYFSCCMSWHRQAPGKDRELVSSISSDGSTHYADSVRGRFTISKGSARNTLYLQMNSLKPEDTAVYFCAASPRQLGPYYAMDYWGQGTSVTVS

SEQ ID NO: 1481 - protein, 115 aa, synthetic construct
DVQLVESGGGLVQAGGSLRLSCAASGFPYFSCCMSWHRQAPGKDRELVSSISSDGSTHYADSVRGRFTISRDNAKHTVYLQMNSLKPEDTAVYYCAGVGDYGRRAMGQGTSVTVS

SEQ ID NO: 1482 - protein, 115 aa, synthetic construct
DVQLVESGGGLVQAGGSLRLSCAASGFPYFSCCMSWHRQAPGKDRELVSSISSDGSTHYADSVRGRFTISRDNAKNTVYLQMNSLKPEDTAVYYCAGVGDYGRRAMGQGTSVTVS

SEQ ID NO: 1483 - protein, 115 aa, synthetic construct
DVQLVESGGGLVQAGGSLRLSCAASGFPYFSCCMSWHRQAPGKDRELVSSISSDGSTHYADSVRGRFTISRDNAKQTVYLQMNSLKPEDTAVYYCAGVGDYGRRAMGQGTSVTVS

SEQ ID NO: 1484 - protein, 115 aa, synthetic construct
DVQLVESGGGLVQAGGSLRLSCAASGFPYFSCCMSWHRQAPGKDRELVSSISSDGSTHYADSVRGRFTVSRDNAKHTVYLQMNSLKPEDTAVYYCAGVGDYGRRAMGQGTSVTVS

SEQ ID NO: 1485 - protein, 120 aa, synthetic construct
DVQLVESGGGLVQAGGSLRLSCAASGFPYFSCCMSWHRQAPGKDRELVSSISSDGSTHYAESVRGRFTISKGNARNTLYLQMNSLKPEDTAVYFCAASPRQLGPYYAMDYWGQGTSVTVS

SEQ ID NO: 1486 - protein, 120 aa, synthetic construct
DVQLVESGGGLVQAGGSLRLSCAASGFPYFSCCMSWHRQAPGKDRELVSSISSGGSTHYADSVRGRFTISKGNARNTLYLQMNSLKPEDTAVYFCAASPRQLGPYYAMDYWGQGTSVTVS

SEQ ID NO: 1487 - protein, 120 aa, synthetic construct
DVQLVESGGGLVQAGGSLRLSCAASGFPYFSCCMSWHRQAPGKDRELVSSISSYGSTHYADSVRGRFTISKGNARNTLYLQMNSLKPEDTAVYFCAASPRQLGPYYAMDYWGQGTSVTVS

SEQ ID NO: 1488 - protein, 120 aa, synthetic construct
DVQLVESGGGLVQAGGSLRLSCAASGFPYFSCCMSWHRQAPRKDRELVSSISSDGSTHYADSVRGRFTISKGNARNTLYLQMNSLKPEDTAVYFCAASPRQLGPYYAMDYWGQGTSVTVS

SEQ ID NO: 1489 - protein, 120 aa, synthetic construct
DVQLVESGGGLVQAGGSLRLSCAASGLPYFSCCMSWHRQAPGKDRELVSSISSDGSTHYADSVRGRFTISKGNARNTLYLQMNSLKPEDTAVYFCAASPRQLGPYYAMDYWGQGTSVTVS

SEQ ID NO: 1490 - protein, 115 aa, synthetic construct
DVQLVESGGGLVQAGGSLRLSCAASGVPYFSCCMSWHRQAPGKDRELVSSISSDGSTHYADSVKGRFTISRDNAKNTVYLQMNSLKPEDTAVYYCNGGWSLAMDYWGQGTSVTVS

SEQ ID NO: 1491 - protein, 120 aa, synthetic construct
DVQLVESGGGLVQAGGSLRLSCAASGVPYFSCCMSWHRQAPGKDRELVSSISSDGSTHYADSVRGRFTISKGNARNTLYLQMNSLKPEDTAVYFCAASPRQLGPYYAMDYWGQGTSVTVS

SEQ ID NO: 1492 - protein, 120 aa, synthetic construct
DVQLVESGGGLVQAGGSLRLSCAVSGFPYFSCCMSWHRQAPGKDRELVSSISSDGSTHYADSVRGRFTISKGNARNTLYLQMNSLKPEDTAVYFCAASPRQLGPYYAMDYWGQGTSVTVS

SEQ ID NO: 1493 - protein, 120 aa, synthetic construct
DVQLVESGGGLVQAGGSLWLSCAASGFPYFSCCMSWHRQAPGKDRELVSSISSDGSTHYADSVRGRFTISKGNARNTLYLQMNSLKPEDTAVYFCAASPRQLGPYYAMDYWGQGTSVTVS

SEQ ID NO: 1494 - protein, 120 aa, synthetic construct
DVQLVESGGGLVQAGGTLRLSCAASGFPYFSCCMSWHRQAPGKDRELVSSISSDGSTHYADSVRGRFTISKGNARNTLYLQMNSLKPEDTAVYFCAASPRQLGPYYAMDYWGQGTSVTVS

SEQ ID NO: 1495 - protein, 120 aa, synthetic construct
DVQLVESGGVLVQAGGSLRLSCAASGFPYFSCCMSWHRQAPGKDRELVSSISSDGSTHYADSVRGRFTISKGNARNTLYLQMNSLKPEDTAVYFCAASPRQLGPYYAMDYWGQGTSVTVS

SEQ ID NO: 1496 - protein, 120 aa, synthetic construct
DVQLVESGWGLVQAGGSLRLSCAASGFPYFSCCMSWHRQAPGKDRELVSSISSDGSTHYADSVRGRFTISKGNARNTLYLQMNSLKPEDTAVYFCAASPRQLGPYYAMDYWGQGTSVTVS

SEQ ID NO: 1497 - protein, 120 aa, synthetic construct
EVQLVESGGGLVQAGGSLRLSCAASGFPYFSCCMSWHRQAPGKDRELVSSISSDGSTHYADSVRGRFTISKGNARNTLYLQMNSLKPEDTAVYFCAASPRQLGPYYAMDYWGQGTSVTVS

SEQ ID NO: 1498 - protein, 119 aa, synthetic construct
LQLVESGGGLVQPGGSLRLSCAASGFPYFSCCMSWHRQAPGKDRELVSSISSDGSTHYADSVRGRFTISKGNARNTLYLQMNSLKPEDTAVYFCAASPRQLGPYYAMDYWGQGTSVTVS

SEQ ID NO: 1499 - protein, 117 aa, synthetic construct
LVESGGGLVQAGGSLRLSCAASGFPYFSCCMSWHRQAPGKDRELVSSISSDGSTHYADSVRGRFTISKGNARNTLYLQMNSLKPEDTAVYFCAASPRQLGPYYAMDYWGQGTSVTVS

SEQ ID NO: 1500 - protein, 116 aa, synthetic construct
VESGGGLVQAGGSLRLSCAASGFPYFSCCMSWHRQAPGKDRELVSSISSDGSTHYADSVRGRFTISKGNARNTLYLQMNSLKPEDTAVYFCAASPRQLGPYYAMDYWGQGTSVTVS

SEQ ID NO: 1501 - protein, 119 aa, synthetic construct
VKLEESGGGSVQAGGSLRLSCAASGFPYFSCCMSWHRQAPGKDRELVSSISSDGSTHYADSVRGRFTISKGNARNTLYLQMNSLKPEDTAVYFCAASPRQLGPYYAMDYWGQGTSVTVS

SEQ ID NO: 1502 - protein, 119 aa, synthetic construct
VQLVESGGGLVQAGGSLRLSCAASGFPYFSCCMSWHRQAPGKDRELVSSISSDGSTHYADSVRGRFTISKGNARNTLYLQMNSLKPEDTAVYFCAASPRQLGPYYAMDYWGQGTSVTVS

SEQ ID NO: 1503 - protein, 118 aa, synthetic construct
ELQLVESGGGLVQPGGSLRLSCAASGFTLDYYAIGWFRQAPGKEREGVSYISSSGGSTNYADSVKGRFTISRDNAKNTVYLQMNSLKPEDTGVYSCAAAGGYGNSSRYWGQGTSVTVS

SEQ ID NO: 1504 - protein, 113 aa, synthetic construct
ESGGGLVQPGGSLRLSCAASGFTLDYYAIGWFRQAPGKEREGVSYISSSGGSTNYADSVKGRFTISRDNAKNTVYLQMNSLKPEDTGVYSCAAAGGYGNSSRYWGQGTSVTVS

SEQ ID NO: 1505 - protein, 118 aa, synthetic construct
EVQLVESGGGLVQPGGSLRLSCAASGFTLDYYAIGWFRQAPGKEREGVSYISSSGGSTNYADSVKGRFTISRDNAKNTVYLQMNSLKPEDTGVYSCAAAGGYGNSSRYWGQGTSVTVS

SEQ ID NO: 1506 - protein, 117 aa, synthetic construct
FQLVESGGGLVQPGGSLRLSCAASGFTLDYYAIGWFRQAPGKEREGVSYISSSGGSTNYADSVKGRFTISRDNAKNTVYLQMNSLKPEDTGVYSCAAAGGYGNSSRYWGQGTSVTVS

SEQ ID NO: 1507 - protein, 111 aa, synthetic construct
GGGLVQPGGSLRLSCAASGFTLDYYAIGWFRQAPGKEREGVSYISSSGGSTNYADSVKGRFTISRDNAKNTVYLQMNSLKPEDTGVYSCAAAGGYGNSSRYWGQGTSVTVS

SEQ ID NO: 1508 - protein, 116 aa, synthetic construct
KLVESGGGLVQPGGSLRLSCAASGFTLDYYAIGWFRQAPGKEREGVSYISSSGGSTNYADSVKGRFTISRDNAKNTVYLQMNSLKPEDTGVYSCAAAGGYGNSSRYWGQGTSVTVS

SEQ ID NO: 1509 - protein, 117 aa, synthetic construct
LHLVESGGGLVQPGGSLRLSCAASGFTLDYYAIGWFRQAPGKEREGVSYISSSGGSTNYADSVKGRFTISRDNAKNTVYLQMNSLKPEDTGVYSCAAAGGYGNSSRYWGQGTSVTVS

SEQ ID NO: 1510 - protein, 117 aa, synthetic construct
LQLAESGGGLVQPGGSLRLSCAASGFTLDYYAIGWFRQAPGKEREGVSYISSSGGSTNYADSVKGRFTISRDNAKNTVYLQMNSLKPEDTGVYSCAAAGGYGNSSRYWGQGTSVTVS

SEQ ID NO: 1511 - protein, 117 aa, synthetic construct
LQLEESGGGLVQPGGSLRLSCAASGFTLDYYAIGWFRQAPGKEREGVSYISSSGGSTNYADSVKGRFTISRDNAKNTVYLQMNSLKPEDTGVYSCAAAGGYGNSSRYWGQGTSVTVS

SEQ ID NO: 1512 - protein, 117 aa, synthetic construct
LQLGESGGGLVQPGGSLRLSCAASGFTLDYYAIGWFRQAPGKEREGVSYISSSGGSTNYADSVKGRFTISRDNAKNTVYLQMNSLKPEDTGVYSCAAAGGYGNSSRYWGQGTSVTVS

SEQ ID NO: 1513 - protein, 117 aa, synthetic construct
LQLGESGGGLVQPGGSLRLSCAASGVTLDYYAIGWFRQAPGKEREGVSYISSSGGSTNYADSVKGRFTISRDNAKNTVYLQMNSLKPEDTGVYSCAAAGGYGNSSRYWGQGTSVTVS

SEQ ID NO: 1514 - protein, 117 aa, synthetic construct
LQLIESGGGLVQPGGSLRLSCAASGFTLDYYAIGWFRQAPGKEREGVSYISSSGGSTNYADSVKGRFTISRDNAKNTVYLQMNSLKPEDTGVYSCAAAGGYGNSSRYWGQGTSVTVS

SEQ ID NO: 1515 - protein, 117 aa, synthetic construct
LQLLESGGGLVQPGGSLRLSCAASGFTLDYYAIGWFRQAPGKEREGVSYISSSGGSTNYADSVKGRFTISRDNAKNTVYLQMNSLKPEDTGVYSCAAAGGYGNSSRYWGQGTSVTVS

SEQ ID NO: 1516 - protein, 117 aa, synthetic construct
LQLVECGGGLVQPGGSLRLSCAASGFTLDYYAIGWFRQAPGKEREGVSYISSSGGSTNYADSVKGRFTISRDNAKNTVYLQMNSLKPEDTGVYSCAAAGGYGNSSRYWGQGTSVTVS

SEQ ID NO: 1517 - protein, 117 aa, synthetic construct
LQLVENGGGLVQPGGSLRLSCAASGFTLDYYAIGWFRQAPGKEREGVSYISSSGGSTNYADSVKGRFTISRDNAKNTVYLQMNSLKPEDTGVYSCAAAGGYGNSSRYWGQGTSVTVS

SEQ ID NO: 1518 - protein, 117 aa, synthetic construct
LQLVERGGGLVQPGGSLRLSCAASGFTLDYYAIGWFRQAPGKEREGVSYISSSGGSTNYADSVKGRFTISRDNAKNTVYLQMNSLKPEDTGVYSCAAAGGYGNSSRYWGQGTSVTVS

SEQ ID NO: 1519 - protein, 117 aa, synthetic construct
LQLVESCGGLVQPGGSLRLSCAASGFTLDYYAIGWFRQAPGKEREGVSYISSSGGSTNYADSVKGRFTISRDNAKNTVYLQMNSLKPEDTGVYSCAAAGGYGNSSRYWGQGTSVTVS

SEQ ID NO: 1520 - protein, 117 aa, synthetic construct
LQLVESGGGFVQPGGSLRLSCAASGFTLDYYAIGWFRQAPGKEREGVSYISSSGGSTNYADSVKGRFTISRDNAKNTVYLQMNSLKPEDTGVYSCAAAGGYGNSSRYWGQGTSVTVS

SEQ ID NO: 1521 - protein, 117 aa, synthetic construct
LQLVESGGGHVQPGGSLRLSCAASGFTLDYYAIGWFRQAPGKEREGVSYISSSGGSTNYADSVKGRFTISRDNAKNTVYLQMNSLKPEDTGVYSCAAAGGYGNSSRYWGQGTSVTVS

SEQ ID NO: 1522 - protein, 117 aa, synthetic construct
LQLVESGGGIVQPGGSLRLSCAASGFTLDYYAIGWFRQAPGKEREGVSYISSSGGSTNYADSVKGRFTISRDNAKNTVYLQMNSLKPEDTGVYSCAAAGGYGNSSRYWGQGTSVTVS

SEQ ID NO: 1523 - protein, 117 aa, synthetic construct
LQLVESGGGLAQPGGSLRLSCAASGFTLDYYAIGWFRQAPGKEREGVSYISSSGGSTNYADSVKGRFTISRDNAKNTVYLQMNSLKPEDTGVYSCAAAGGYGNSSRYWGQGTSVTVS

SEQ ID NO: 1524 - protein, 117 aa, synthetic construct
LQLVESGGGLDQPGGSLRLSCAASGFTLDYYAIGWFRQAPGKEREGVSYISSSGGSTNYADSVKGRFTISRDNAKNTVYLQMNSLKPEDTGVYSCAAAGGYGNSSRYWGQGTSVTVS

SEQ ID NO: 1525 - protein, 117 aa, synthetic construct
LQLVESGGGLIQPGGSLRLSCAASGFTLDYYAIGWFRQAPGKEREGVSYISSSGGSTNYADSVKGRFTISRDNAKNTVYLQMNSLKPEDTGVYSCAAAGGYGNSSRYWGQGTSVTVS

SEQ ID NO: 1526 - protein, 117 aa, synthetic construct
LQLVESGGGLVHPGGSLRLSCAASGFTLDYYAIGWFRQAPGKEREGVSYISSSGGSTNYADSVKGRFTISRDNAKNTVYLQMNSLKPEDTGVYSCAAAGGYGNSSRYWGQGTSVTVS

SEQ ID NO: 1527 - protein, 117 aa, synthetic construct
LQLVESGGGLVQLGGSLRLSCAASGFTLDYYAIGWFRQAPGKEREGVSYISSSGGSTNYADSVKGRFTISRDNAKNTVYLQMNSLKPEDTGVYSCAAAGGYGNSSRYWGQGTSVTVS

SEQ ID NO: 1528 - protein, 117 aa, synthetic construct
LQLVESGGGLVQPGGALRLSCAASGFTLDYYAIGWFRQAPGKEREGVSYISSSGGSTNYADSVKGRFTISRDNAKNTVYLQMNSLKPEDTGVYSCAAAGGYGNSSRYWGQGTSVTVS

SEQ ID NO: 1529 - protein, 117 aa, synthetic construct
LQLVESGGGLVQPGGALRLSCAASGFTLDYYAIGWVRQAPGKEREGVSYISSSGGSTNYADSVKGRFTISRDNAKNTVYLQMNSLKPEDTGVYSCAAAGGYGNSSRYWGQGTSVTVS

SEQ ID NO: 1530 - protein, 117 aa, synthetic construct
LQLVESGGGLVQPGGFLRLSCAASGFTLDYYAIGWFRQAPGKEREGVSYISSSGGSTNYADSVKGRFTISRDNAKNTVYLQMNSLKPEDTGVYSCAAAGGYGNSSRYWGQGTSVTVS

SEQ ID NO: 1531 - protein, 117 aa, synthetic construct
LQLVESGGGLVQPGGPLRLSCAASGFTLDYYAIGWFRQAPGKEREGVSYISSSGGSTNYADSVKGRFTISRDNAKNTVYLQMNSLKPEDTGVYSCAAAGGYGNSSRYWGQGTSVTVS

SEQ ID NO: 1532 - protein, 117 aa, synthetic construct
LQLVESGGGLVQPGGSIRLSCAASGFTLDYYAIGWFRQAPGKEREGVSYISSSGGSTNYADSVKGRFTISRDNAKNTVYLQMNSLKPEDTGVYSCAAAGGYGNSSRYWGQGTSVTVS

SEQ ID NO: 1533 - protein, 117 aa, synthetic construct
LQLVESGGGLVQPGGSLRLGCAASGFTLDYYAIGWFRQAPGKEREGVSYISSSGGSTNYADSVKGRFTISRDNAKNTVYLQMNSLKPEDTGVYSCAAAGGYGNSSRYWGQGTSVTVS

SEQ ID NO: 1534 - protein, 117 aa, synthetic construct
LQLVESGGGLVQPGGSLRLICAASGFTLDYYAIGWFRQAPGKEREGVSYISSSGGSTNYADSVKGRFTISRDNAKNTVYLQMNSLKPEDTGVYSCAAAGGYGNSSRYWGQGTSVTVS

SEQ ID NO: 1535 - protein, 117 aa, synthetic construct
LQLVESGGGLVQPGGSLRLRCAASGFTLDYYAIGWFRQAPGKEREGVSYISSSGGSTNYADSVKGRFTISRDNAKNTVYLQMNSLKPEDTGVYSCAAAGGYGNSSRYWGQGTSVTVS

SEQ ID NO: 1536 - protein, 117 aa, synthetic construct
LQLVESGGGLVQPGGSLRLSCAACGFTLDYYAIGWFRQAPGKEREGVSYISSSGGSTNYADSVKGRFTISRDNAKNTVYLQMNSLKPEDTGVYSCAAAGGYGNSSRYWGQGTSVTVS

SEQ ID NO: 1537 - protein, 117 aa, synthetic construct
LQLVESGGGLVQPGGSLRLSCAAGGFTLDYYAIGWFRQAPGKEREGVSYISSSGGSTNYADSVKGRFTISRDNAKNTVYLQMNSLKPEDTGVYSCAAAGGYGNSSRYWGQGTSVTVS

SEQ ID NO: 1538 - protein, 117 aa, synthetic construct
LQLVESGGGLVQPGGSLRLSCAAIGFTLDYYAIGWFRQAPGKEREGVSYISSSGGSTNYADSVKGRFTISRDNAKNTVYLQMNSLKPEDTGVYSCAAAGGYGNSSRYWGQGTSVTVS

SEQ ID NO: 1539 - protein, 117 aa, synthetic construct
LQLVESGGGLVQPGGSLRLSCAARGFTLDYYAIGWFRQAPGKEREGVSYISSSGGSTNYADSVKGRFTISRDNAKNTVYLQMNSLKPEDTGVYSCAAAGGYGNSSRYWGQGTSVTVS

SEQ ID NO: 1540 - protein, 117 aa, synthetic construct
LQLVESGGGLVQPGGSLRLSCAASEFTLDYYAIGWFRQAPGKEREGVSYISSSGGSTNYADSVKGRFTISRDNAKNTVYLQMNSLKPEDTGVYSCAAAGGYGNSSRYWGQGTSVTVS

SEQ ID NO: 1541 - protein, 117 aa, synthetic construct
LQLVESGGGLVQPGGSLRLSCAASGFTLDFYAIGWFRQAPGKEREGVSYISSSGGSTNYADSVKGRFTISRDNAKNTVYLQMNSLKPEDTGVYSCAAAGGYGNSSRYWGQGTSVTVS

SEQ ID NO: 1542 - protein, 117 aa, synthetic construct
LQLVESGGGLVQPGGSLRLSCAASGFTLDHYAIGWFRQAPGKEREGVSYISSSGGSTNYADSVKGRFTISRDNAKNTVYLQMNSLKPEDTGVYSCAAAGGYGNSSRYWGQGTSVTVS

SEQ ID NO: 1543 - protein, 117 aa, synthetic construct
LQLVESGGGLVQPGGSLRLSCAASGFTLDYCAIGWFRQAPGKEREGVSYISSSGGSTNYADSVKGRFTISRDNAKNTVYLQMNSLKPEDTGVYSCAAAGGYGNSSRYWGQGTSVTVS

SEQ ID NO: 1544 - protein, 117 aa, synthetic construct
LQLVESGGGLVQPGGSLRLSCAASGFTLDYHAIGWFRQAPGKEREGVSYISSSGGSTNYADSVKGRFTISRDNAKNTVYLQMNSLKPEDTGVYSCAAAGGYGNSSRYWGQGTSVTVS

SEQ ID NO: 1545 - protein, 117 aa, synthetic construct
LQLVESGGGLVQPGGSLRLSCAASGFTLDYYAIDWFRQAPGKEREGVSYISSSGGSTNYADSVKGRFTISRDNAKNTVYLQMNSLKPEDTGVYSCAAAGGYGNSSRYWGQGTSVTVS

SEQ ID NO: 1546 - protein, 117 aa, synthetic construct
LQLVESGGGLVQPGGSLRLSCAASGFTLDYYAIGLFRQAPGKEREGVSYISSSGGSTNYADSVKGRFTISRDNAKNTVYLQMNSLKPEDTGVYSCAAAGGYGNSSRYWGQGTSVTVS

SEQ ID NO: 1547 - protein, 117 aa, synthetic construct
LQLVESGGGLVQPGGSLRLSCAASGFTLDYYAIGRFRQAPGKEREGVSYISSSGGSTNYADSVKGRFTISRDNAKNTVYLQMNSLKPEDTGVYSCAAAGGYGNSSRYWGQGTSVTVS

SEQ ID NO: 1548 - protein, 117 aa, synthetic construct
LQLVESGGGLVQPGGSLRLSCAASGFTLDYYAIGWFLQAPGKEREGVSYISSSGGSTNYADSVKGRFTISRDNAKNTVYLQMNSLKPEDTGVYSCAAAGGYGNSSRYWGQGTSVTVS

SEQ ID NO: 1549 - protein, 117 aa, synthetic construct
LQLVESGGGLVQPGGSLRLSCAASGFTLDYYAIGWFQQAPGKEREGVSYISSSGGSTNYADSVKGRFTISRDNAKNTVYLQMNSLKPEDTGVYSCAAAGGYGNSSRYWGQGTSVTVS

SEQ ID NO: 1550 - protein, 117 aa, synthetic construct
LQLVESGGGLVQPGGSLRLSCAASGFTLDYYAIGWFRHAPGKEREGVSYISSSGGSTNYADSVKGRFTISRDNAKNTVYLQMNSLKPEDTGVYSCAAAGGYGNSSRYWGQGTSVTVS

SEQ ID NO: 1551 - protein, 117 aa, synthetic construct
LQLVESGGGLVQPGGSLRLSCAASGFTLDYYAIGWFRQALGKEREGVSYISSSGGSTNYADSVKGRFTISRDNAKNTVYLQMNSLKPEDTGVYSCAAAGGYGNSSRYWGQGTSVTVS

SEQ ID NO: 1552 - protein, 117 aa, synthetic construct
LQLVESGGGLVQPGGSLRLSCAASGFTLDYYAIGWFRQAPGEEREGVSYISSSGGSTNYADSVKGRFTISRDNAKNTVYLQMNSLKPEDTGVYSCAAAGGYGNSSRYWGQGTSVTVS

SEQ ID NO: 1553 - protein, 117 aa, synthetic construct
LQLVESGGGLVQPGGSLRLSCAASGFTLDYYAIGWFRQAPGKELEGVSYISSSGGSTNYADSVKGRFTISRDNAKNTVYLQMNSLKPEDTGVYSCAAAGGYGNSSRYWGQGTSVTVS

SEQ ID NO: 1554 - protein, 117 aa, synthetic construct
LQLVESGGGLVQPGGSLRLSCAASGFTLDYYAIGWFRQAPGKEQEGVSYISSSGGSTNYADSVKGRFTISRDNAKNTVYLQMNSLKPEDTGVYSCAAAGGYGNSSRYWGQGTSVTVS

SEQ ID NO: 1555 - protein, 117 aa, synthetic construct
LQLVESGGGLVQPGGSLRLSCAASGFTLDYYAIGWFRQAPGKERDGVSYISSSGGSTNYADSVKGRFTISRDNAKNTVYLQMNSLKPEDTGVYSCAAAGGYGNSSRYWGQGTSVTVS

SEQ ID NO: 1556 - protein, 117 aa, synthetic construct
LQLVESGGGLVQPGGSLRLSCAASGFTLDYYAIGWFRQAPGKEREEVSYISSSGGSTNYADSVKGRFTISRDNAKNTVYLQMNSLKPEDTGVYSCAAAGGYGNSSRYWGQGTSVTVS

SEQ ID NO: 1557 - protein, 117 aa, synthetic construct
LQLVESGGGLVQPGGSLRLSCAASGFTLDYYAIGWFRQAPGKEREGASYISSSGGSTNYADSVKGRFTISRDNAKNTVYLQMNSLKPEDTGVYSCAAAGGYGNSSRYWGQGTSVTVS

SEQ ID NO: 1558 - protein, 117 aa, synthetic construct
LQLVESGGGLVQPGGSLRLSCAASGFTLDYYAIGWFRQAPGKEREGVPYISSSGGSTNYADSVKGRFTISRDNAKNTVYLQMNSLKPEDTGVYSCAAAGGYGNSSRYWGQGTSVTVS

SEQ ID NO: 1559 - protein, 117 aa, synthetic construct
LQLVESGGGLVQPGGSLRLSCAASGFTLDYYAIGWFRQAPGKEREGVSHISSSGGSTNYADSVKGRFTISRDNAKNTVYLQMNSLKPEDTGVYSCAAAGGYGNSSRYWGQGTSVTVS

SEQ ID NO: 1560 - protein, 117 aa, synthetic construct
LQLVESGGGLVQPGGSLRLSCAASGFTLDYYAIGWFRQAPGKEREGVSYIRSSGGSTNYADSVKGRFTISRDNAKNTVYLQMNSLKPEDTGVYSCAAAGGYGNSSRYWGQGTSVTVS

SEQ ID NO: 1561 - protein, 117 aa, synthetic construct
LQLVESGGGLVQPGGSLRLSCAASGFTLDYYAIGWFRQAPGKEREGVSYISGSGGSTNYADSVKGRFTISRDNAKNTVYLQMNSLKPEDTGVYSCAAAGGYGNSSRYWGQGTSVTVS

SEQ ID NO: 1562 - protein, 117 aa, synthetic construct
LQLVESGGGLVQPGGSLRLSCAASGFTLDYYAIGWFRQAPGKEREGVSYISSPGGSTNYADSVKGRFTISRDNAKNTVYLQMNSLKPEDTGVYSCAAAGGYGNSSRYWGQGTSVTVS

SEQ ID NO: 1563 - protein, 117 aa, synthetic construct
LQLVESGGGLVQPGGSLRLSCAASGFTLDYYAIGWFRQAPGKEREGVSYISSSCGSTNYADSVKGRFTISRDNAKNTVYLQMNSLKPEDTGVYSCAAAGGYGNSSRYWGQGTSVTVS

SEQ ID NO: 1564 - protein, 117 aa, synthetic construct
LQLVESGGGLVQPGGSLRLSCAASGFTLDYYAIGWFRQAPGKEREGVSYISSSDGSTNYADSVKGRFTISRDNAKNTVYLQMNSLKPEDTGVYSCAAAGGYGNSSRYWGQGTSVTVS

SEQ ID NO: 1565 - protein, 117 aa, synthetic construct
LQLVESGGGLVQPGGSLRLSCAASGFTLDYYAIGWFRQAPGKEREGVSYISSSGCSTNYADSVKGRFTISRDNAKNTVYLQMNSLKPEDTGVYSCAAAGGYGNSSRYWGQGTSVTVS

SEQ ID NO: 1566 - protein, 117 aa, synthetic construct
LQLVESGGGLVQPGGSLRLSCAASGFTLDYYAIGWFRQAPGKEREGVSYISSSGGPTNYADSVKGRFTISRDNAKNTVYLQMNSLKPEDTGVYSCAAAGGYGNSSRYWGQGTSVTVS

SEQ ID NO: 1567 - protein, 117 aa, synthetic construct
LQLVESGGGLVQPGGSLRLSCAASGFTLDYYAIGWFRQAPGKEREGVSYISSSGGSSNYADSVKGRFTISRDNAKNTVYLQMNSLKPEDTGVYSCAAAGGYGNSSRYWGQGTSVTVS

SEQ ID NO: 1568 - protein, 117 aa, synthetic construct
LQLVESGGGLVQPGGSLRLSCAASGFTLDYYAIGWFRQAPGKEREGVSYISSSGGSTDYADSVKGRFTISRDNAKNTVYLQMNSLKPEDTGVYSCAAAGGYGNSSRYWGQGTSVTVS

SEQ ID NO: 1569 - protein, 117 aa, synthetic construct
LQLVESGGGLVQPGGSLRLSCAASGFTLDYYAIGWFRQAPGKEREGVSYISSSGGSTNCADSVKGRFTISRDNAKNTVYLQMNSLKPEDTGVYSCAAAGGYGNSSRYWGQGTSVTVS

SEQ ID NO: 1570 - protein, 117 aa, synthetic construct
LQLVESGGGLVQPGGSLRLSCAASGFTLDYYAIGWFRQAPGKEREGVSYISSSGGSTNHADSVKGRFTISRDNAKNTVYLQMNSLKPEDTGVYSCAAAGGYGNSSRYWGQGTSVTVS

SEQ ID NO: 1571 - protein, 117 aa, synthetic construct
LQLVESGGGLVQPGGSLRLSCAASGFTLDYYAIGWFRQAPGKEREGVSYISSSGGSTNYADSMKGRFTISRDNAKNTVYLQMNSLKPEDTGVYSCAAAGGYGNSSRYWGQGTSVTVS

SEQ ID NO: 1572 - protein, 117 aa, synthetic construct
LQLVESGGGLVQPGGSLRLSCAASGFTLDYYAIGWFRQAPGKEREGVSYISSSGGSTNYADSVEGRFTISRDNAKNTVYLQMNSLKPEDTGVYSCAAAGGYGNSSRYWGQGTSVTVS

SEQ ID NO: 1573 - protein, 117 aa, synthetic construct
LQLVESGGGLVQPGGSLRLSCAASGFTLDYYAIGWFRQAPGKEREGVSYISSSGGSTNYADSVKGGFTISRDNAKNTVYLQMNSLKPEDTGVYSCAAAGGYGNSSRYWGQGTSVTVS

SEQ ID NO: 1574 - protein, 117 aa, synthetic construct
LQLVESGGGLVQPGGSLRLSCAASGFTLDYYAIGWFRQAPGKEREGVSYISSSGGSTNYADSVKGRFTISQDNAKNTVYLQMNSLKPEDTGVYSCAAAGGYGNSSRYWGQGTSVTVS

SEQ ID NO: 1575 - protein, 117 aa, synthetic construct
LQLVESGGGLVQPGGSLRLSCAASGFTLDYYAIGWFRQAPGKEREGVSYISSSGGSTNYADSVKGRFTISRDDAKNTVYLQMNSLKPEDTGVYSCAAAGGYGNSSRYWGQGTSVTVS

SEQ ID NO: 1576 - protein, 117 aa, synthetic construct
LQLVESGGGLVQPGGSLRLSCAASGFTLDYYAIGWFRQAPGKEREGVSYISSSGGSTNYADSVKGRFTISRDIAKNTVYLQMNSLKPEDTGVYSCAAAGGYGNSSRYWGQGTSVTVS

SEQ ID NO: 1577 - protein, 117 aa, synthetic construct
LQLVESGGGLVQPGGSLRLSCAASGFTLDYYAIGWFRQAPGKEREGVSYISSSGGSTNYADSVKGRFTISRDKAKNTVYLQMNSLKPEDTGVYSCAAAGGYGNSSRYWGQGTSVTVS

SEQ ID NO: 1578 - protein, 117 aa, synthetic construct
LQLVESGGGLVQPGGSLRLSCAASGFTLDYYAIGWFRQAPGKEREGVSYISSSGGSTNYADSVKGRFTISRDNAENTVYLQMNSLKPEDTGVYSCAAAGGYGNSSRYWGQGTSVTVS

SEQ ID NO: 1579 - protein, 117 aa, synthetic construct
LQLVESGGGLVQPGGSLRLSCAASGFTLDYYAIGWFRQAPGKEREGVSYISSSGGSTNYADSVKGRFTISRDNAKDTVYLQMNSLKPEDTGVYSCAAAGGYGNSSRYWGQGTSVTVS

SEQ ID NO: 1580 - protein, 117 aa, synthetic construct
LQLVESGGGLVQPGGSLRLSCAASGFTLDYYAIGWFRQAPGKEREGVSYISSSGGSTNYADSVKGRFTISRDNAKNAVYLQMNSLKPEDTGVYSCAAAGGYGNSSRYWGQGTSVTVS

SEQ ID NO: 1581 - protein, 117 aa, synthetic construct
LQLVESGGGLVQPGGSLRLSCAASGFTLDYYAIGWFRQAPGKEREGVSYISSSGGSTNYADSVKGRFTISRDNAKNPVYLQMNSLKPEDTGVYSCAAAGGYGNSSRYWGQGTSVTVS

SEQ ID NO: 1582 - protein, 117 aa, synthetic construct
LQLVESGGGLVQPGGSLRLSCAASGFTLDYYAIGWFRQAPGKEREGVSYISSSGGSTNYADSVKGRFTISRDNAKNSVYLQMNSLKPEDTGVYSCAAAGGYGNSSRYWGQGTSVTVS

SEQ ID NO: 1583 - protein, 117 aa, synthetic construct
LQLVESGGGLVQPGGSLRLSCAASGFTLDYYAIGWFRQAPGKEREGVSYISSSGGSTNYADSVKGRFTISRDNAKNTAYLQMNSLKPEDTGVYSCAAAGGYGNSSRYWGQGASVTVS

SEQ ID NO: 1584 - protein, 117 aa, synthetic construct
LQLVESGGGLVQPGGSLRLSCAASGFTLDYYAIGWFRQAPGKEREGVSYISSSGGSTNYADSVKGRFTISRDNAKNTAYLQMNSLKPEDTGVYSCAAAGGYGNSSRYWGQGTSVTVS

SEQ ID NO: 1585 - protein, 117 aa, synthetic construct
LQLVESGGGLVQPGGSLRLSCAASGFTLDYYAIGWFRQAPGKEREGVSYISSSGGSTNYADSVKGRFTISRDNAKNTEYLQMNSLKPEDTGVYSCAAAGGYGNSSRYWGQGTSVTVS

SEQ ID NO: 1586 - protein, 117 aa, synthetic construct
LQLVESGGGLVQPGGSLRLSCAASGFTLDYYAIGWFRQAPGKEREGVSYISSSGGSTNYADSVKGRFTISRDNAKNTGYLQMNSLKPEDTGVYSCAAAGGYGNSSRYWGQGTSVTVS

SEQ ID NO: 1587 - protein, 117 aa, synthetic construct
LQLVESGGGLVQPGGSLRLSCAASGFTLDYYAIGWFRQAPGKEREGVSYISSSGGSTNYADSVKGRFTISRDNAKNTMYLQMNSLKPEDTGVYSCAAAGGYGNSSRYWGQGTSVTVS

SEQ ID NO: 1588 - protein, 117 aa, synthetic construct
LQLVESGGGLVQPGGSLRLSCAASGFTLDYYAIGWFRQAPGKEREGVSYISSSGGSTNYADSVKGRFTISRDNAKNTVCLQMNSLKPEDTGVYSCAAAGGYGNSSRYWGQGTSVTVS

SEQ ID NO: 1589 - protein, 117 aa, synthetic construct
LQLVESGGGLVQPGGSLRLSCAASGFTLDYYAIGWFRQAPGKEREGVSYISSSGGSTNYADSVKGRFTISRDNAKNTVYLLMNSLKPEDTGVYSCAAAGGYGNSSRYWGQGTSVTVS

SEQ ID NO: 1590 - protein, 117 aa, synthetic construct
LQLVESGGGLVQPGGSLRLSCAASGFTLDYYAIGWFRQAPGKEREGVSYISSSGGSTNYADSVKGRFTISRDNAKNTVYLQINSLKPEDTGVYSCAAAGGYGNSSRYWGQGTSVTVS

SEQ ID NO: 1591 - protein, 117 aa, synthetic construct
LQLVESGGGLVQPGGSLRLSCAASGFTLDYYAIGWFRQAPGKEREGVSYISSSGGSTNYADSVKGRFTISRDNAKNTVYLQMDSLKPEDTGVYSCAAAGGYGNSSRYWGQGTSVTVS

SEQ ID NO: 1592 - protein, 117 aa, synthetic construct
LQLVESGGGLVQPGGSLRLSCAASGFTLDYYAIGWFRQAPGKEREGVSYISSSGGSTNYADSVKGRFTISRDNAKNTVYLQMNCLKPEDTGVYSCAAAGGYGNSSRYWGQGTSVTVS

SEQ ID NO: 1593 - protein, 117 aa, synthetic construct
LQLVESGGGLVQPGGSLRLSCAASGFTLDYYAIGWFRQAPGKEREGVSYISSSGGSTNYADSVKGRFTISRDNAKNTVYLQMNSHKPEDTGVYSCAAAGGYGNSSRYWGQGTSVTVS

SEQ ID NO: 1594 - protein, 117 aa, synthetic construct
LQLVESGGGLVQPGGSLRLSCAASGFTLDYYAIGWFRQAPGKEREGVSYISSSGGSTNYADSVKGRFTISRDNAKNTVYLQMNSIKPEDTGVYSCAAAGGYGNSSRYWGQGTSVTVS

SEQ ID NO: 1595 - protein, 117 aa, synthetic construct
LQLVESGGGLVQPGGSLRLSCAASGFTLDYYAIGWFRQAPGKEREGVSYISSSGGSTNYADSVKGRFTISRDNAKNTVYLQMNSLEPEDTGVYSCAAAGGYGNSSRYWGQGTSVTVS

SEQ ID NO: 1596 - protein, 117 aa, synthetic construct
LQLVESGGGLVQPGGSLRLSCAASGFTLDYYAIGWFRQAPGKEREGVSYISSSGGSTNYADSVKGRFTISRDNAKNTVYLQMNSLKLEDTGVYSCAAAGGYGNSSRYWGQGTSVTVS

SEQ ID NO: 1597 - protein, 117 aa, synthetic construct
LQLVESGGGLVQPGGSLRLSCAASGFTLDYYAIGWFRQAPGKEREGVSYISSSGGSTNYADSVKGRFTISRDNAKNTVYLQMNSLKPEDAGVYSCAAAGGYGNSSRYWGQGTSVTVS

SEQ ID NO: 1598 - protein, 117 aa, synthetic construct
LQLVESGGGLVQPGGSLRLSCAASGFTLDYYAIGWFRQAPGKEREGVSYISSSGGSTNYADSVKGRFTISRDNAKNTVYLQMNSLKPEDIGVYSCAAAGGYGNSSRYWGQGTSVTVS

SEQ ID NO: 1599 - protein, 117 aa, synthetic construct
LQLVESGGGLVQPGGSLRLSCAASGFTLDYYAIGWFRQAPGKEREGVSYISSSGGSTNYADSVKGRFTISRDNAKNTVYLQMNSLKPEDSGVYSCAAAGGYGNSSRYWGQGTSVTVS

SEQ ID NO: 1600 - protein, 117 aa, synthetic construct
LQLVESGGGLVQPGGSLRLSCAASGFTLDYYAIGWFRQAPGKEREGVSYISSSGGSTNYADSVKGRFTISRDNAKNTVYLQMNSLKPEDSGVYSCAAAGGYGNSSRYWGQGTTVTVS

SEQ ID NO: 1601 - protein, 117 aa, synthetic construct
LQLVESGGGLVQPGGSLRLSCAASGFTLDYYAIGWFRQAPGKEREGVSYISSSGGSTNYADSVKGRFTISRDNAKNTVYLQMNSLKPEDTCVYSCAAAGGYGNSSRYWGQGTSVTVS

SEQ ID NO: 1602 - protein, 117 aa, synthetic construct
LQLVESGGGLVQPGGSLRLSCAASGFTLDYYAIGWFRQAPGKEREGVSYISSSGGSTNYADSVKGRFTISRDNAKNTVYLQMNSLKPEDTDVYSCAAAGGYGNSSRYWGQGTSVTVS

SEQ ID NO: 1603 - protein, 117 aa, synthetic construct
LQLVESGGGLVQPGGSLRLSCAASGFTLDYYAIGWFRQAPGKEREGVSYISSSGGSTNYADSVKGRFTISRDNAKNTVYLQMNSLKPEDTGGYSCAAAGGYGNSSRYWGQGTSVTVS

SEQ ID NO: 1604 - protein, 117 aa, synthetic construct
LQLVESGGGLVQPGGSLRLSCAASGFTLDYYAIGWFRQAPGKEREGVSYISSSGGSTNYADSVKGRFTISRDNAKNTVYLQMNSLKPEDTGIYSCAAAGGYGNSSRYWGQGTSVTVS

SEQ ID NO: 1605 - protein, 117 aa, synthetic construct
LQLVESGGGLVQPGGSLRLSCAASGFTLDYYAIGWFRQAPGKEREGVSYISSSGGSTNYADSVKGRFTISRDNAKNTVYLQMNSLKPEDTGVCSCAAAGGYGNSSRYWGQGTSVTVS

SEQ ID NO: 1606 - protein, 117 aa, synthetic construct
LQLVESGGGLVQPGGSLRLSCAASGFTLDYYAIGWFRQAPGKEREGVSYISSSGGSTNYADSVKGRFTISRDNAKNTVYLQMNSLKPEDTGVFSCAAAGGYGNSSRYWGQGTSVTVS

SEQ ID NO: 1607 - protein, 117 aa, synthetic construct
LQLVESGGGLVQPGGSLRLSCAASGFTLDYYAIGWFRQAPGKEREGVSYISSSGGSTNYADSVKGRFTISRDNAKNTVYLQMNSLKPEDTGVYACAAAGGYGNSSRYWGQGTSVTVS

SEQ ID NO: 1608 - protein, 117 aa, synthetic construct
LQLVESGGGLVQPGGSLRLSCAASGFTLDYYAIGWFRQAPGKEREGVSYISSSGGSTNYADSVKGRFTISRDNAKNTVYLQMNSLKPEDTGVYPCAAAGGYGNSSRYWGQGTSVTVS

SEQ ID NO: 1609 - protein, 117 aa, synthetic construct
LQLVESGGGLVQPGGSLRLSCAASGFTLDYYAIGWFRQAPGKEREGVSYISSSGGSTNYADSVKGRFTISRDNAKNTVYLQMNSLKPEDTGVYSCAAAGCYGNSSRYWGQGASVTVS

SEQ ID NO: 1610 - protein, 117 aa, synthetic construct
LQLVESGGGLVQPGGSLRLSCAASGFTLDYYAIGWFRQAPGKEREGVSYISSSGGSTNYADSVKGRFTISRDNAKNTVYLQMNSLKPEDTGVYSCAAAGCYGNSSRYWGQGTSVTVS

SEQ ID NO: 1611 - protein, 117 aa, synthetic construct
LQLVESGGGLVQPGGSLRLSCAASGFTLDYYAIGWFRQAPGKEREGVSYISSSGGSTNYADSVKGRFTISRDNAKNTVYLQMNSLKPEDTGVYSCAAAGDYGNSSRYWGQGTSVTVS

SEQ ID NO: 1612 - protein, 117 aa, synthetic construct
LQLVESGGGLVQPGGSLRLSCAASGFTLDYYAIGWFRQAPGKEREGVSYISSSGGSTNYADSVKGRFTISRDNAKNTVYLQMNSLKPEDTGVYSCAAAGGCGNSSRYWGQGTSVTVS

SEQ ID NO: 1613 - protein, 117 aa, synthetic construct
LQLVESGGGLVQPGGSLRLSCAASGFTLDYYAIGWFRQAPGKEREGVSYISSSGGSTNYADSVKGRFTISRDNAKNTVYLQMNSLKPEDTGVYSCAAAGGYGDSSRYWGQGTSVTVS

SEQ ID NO: 1614 - protein, 117 aa, synthetic construct
LQLVESGGGLVQPGGSLRLSCAASGFTLDYYAIGWFRQAPGKEREGVSYISSSGGSTNYADSVKGRFTISRDNAKNTVYLQMNSLKPEDTGVYSCAAAGGYGHSSRYWGQGTSVTVS

SEQ ID NO: 1615 - protein, 117 aa, synthetic construct
LQLVESGGGLVQPGGSLRLSCAASGFTLDYYAIGWFRQAPGKEREGVSYISSSGGSTNYADSVKGRFTISRDNAKNTVYLQMNSLKPEDTGVYSCAAAGGYGNASRYWGQGTSVTVS

SEQ ID NO: 1616 - protein, 117 aa, synthetic construct
LQLVESGGGLVQPGGSLRLSCAASGFTLDYYAIGWFRQAPGKEREGVSYISSSGGSTNYADSVKGRFTISRDNAKNTVYLQMNSLKPEDTGVYSCAAAGGYGNCSRYWGQGTSVTVS

SEQ ID NO: 1617 - protein, 117 aa, synthetic construct
LQLVESGGGLVQPGGSLRLSCAASGFTLDYYAIGWFRQAPGKEREGVSYISSSGGSTNYADSVKGRFTISRDNAKNTVYLQMNSLKPEDTGVYSCAAAGGYGNPSRYWGQGTSVTVS

SEQ ID NO: 1618 - protein, 117 aa, synthetic construct
LQLVESGGGLVQPGGSLRLSCAASGFTLDYYAIGWFRQAPGKEREGVSYISSSGGSTNYADSVKGRFTISRDNAKNTVYLQMNSLKPEDTGVYSCAAAGGYGNSPRYWGQGTPVTVS

SEQ ID NO: 1619 - protein, 117 aa, synthetic construct
LQLVESGGGLVQPGGSLRLSCAASGFTLDYYAIGWFRQAPGKEREGVSYISSSGGSTNYADSVKGRFTISRDNAKNTVYLQMNSLKPEDTGVYSCAAAGGYGNSSCYWGQGTSVTVS

SEQ ID NO: 1620 - protein, 117 aa, synthetic construct
LQLVESGGGLVQPGGSLRLSCAASGFTLDYYAIGWFRQAPGKEREGVSYISSSGGSTNYADSVKGRFTISRDNAKNTVYLQMNSLKPEDTGVYSCAAAGGYGNSSHYWGQGTSVTVS

SEQ ID NO: 1621 - protein, 117 aa, synthetic construct
LQLVESGGGLVQPGGSLRLSCAASGFTLDYYAIGWFRQAPGKEREGVSYISSSGGSTNYADSVKGRFTISRDNAKNTVYLQMNSLKPEDTGVYSCAAAGGYGNSSLYWGQGTSVTVS

SEQ ID NO: 1622 - protein, 117 aa, synthetic construct
LQLVESGGGLVQPGGSLRLSCAASGFTLDYYAIGWFRQAPGKEREGVSYISSSGGSTNYADSVKGRFTISRDNAKNTVYLQMNSLKPEDTGVYSCAAAGGYGNSSRYLGQGTSVTVS

SEQ ID NO: 1623 - protein, 117 aa, synthetic construct
LQLVESGGGLVQPGGSLRLSCAASGFTLDYYAIGWFRQAPGKEREGVSYISSSGGSTNYADSVKGRFTISRDNAKNTVYLQMNSLKPEDTGVYSCAAAGGYGNSSRYRGQGTSVTVS

SEQ ID NO: 1624 - protein, 117 aa, synthetic construct
LQLVESGGGLVQPGGSLRLSCAASGFTLDYYAIGWFRQAPGKEREGVSYISSSGGSTNYADSVKGRFTISRDNAKNTVYLQMNSLKPEDTGVYSCAAAGGYGNSSRYWCQGTSVTVS

SEQ ID NO: 1625 - protein, 117 aa, synthetic construct
LQLVESGGGLVQPGGSLRLSCAASGFTLDYYAIGWFRQAPGKEREGVSYISSSGGSTNYADSVKGRFTISRDNAKNTVYLQMNSLKPEDTGVYSCAAAGGYGNSSRYWDQGTSVTVS

SEQ ID NO: 1626 - protein, 117 aa, synthetic construct
LQLVESGGGLVQPGGSLRLSCAASGFTLDYYAIGWFRQAPGKEREGVSYISSSGGSTNYADSVKGRFTISRDNAKNTVYLQMNSLKPEDTGVYSCAAAGGYGNSSRYWGEGTSVTVS

SEQ ID NO: 1627 - protein, 117 aa, synthetic construct
LQLVESGGGLVQPGGSLRLSCAASGFTLDYYAIGWFRQAPGKEREGVSYISSSGGSTNYADSVKGRFTISRDNAKNTVYLQMNSLKPEDTGVYSCAAAGGYGNSSRYWGPGASVTVS

SEQ ID NO: 1628 - protein, 117 aa, synthetic construct
LQLVESGGGLVQPGGSLRLSCAASGFTLDYYAIGWFRQAPGKEREGVSYISSSGGSTNYADSVKGRFTISRDNAKNTVYLQMNSLKPEDTGVYSCAAAGGYGNSSRYWGQGASVTVS

SEQ ID NO: 1629 - protein, 117 aa, synthetic construct
LQLVESGGGLVQPGGSLRLSCAASGFTLDYYAIGWFRQAPGKEREGVSYISSSGGSTNYADSVKGRFTISRDNAKNTVYLQMNSLKPEDTGVYSCAAAGGYGNSSRYWGQGNSVTVS

SEQ ID NO: 1630 - protein, 117 aa, synthetic construct
LQLVESGGGLVQPGGSLRLSCAASGFTLDYYAIGWFRQAPGKEREGVSYISSSGGSTNYADSVKGRFTISRDNAKNTVYLQMNSLKPEDTGVYSCAAAGGYGNSSRYWGQGPSVTVS

SEQ ID NO: 1631 - protein, 117 aa, synthetic construct
LQLVESGGGLVQPGGSLRLSCAASGFTLDYYAIGWFRQAPGKEREGVSYISSSGGSTNYADSVKGRFTISRDNAKNTVYLQMNSLKPEDTGVYSCAAAGGYGNSSRYWGQGTLVTVS

SEQ ID NO: 1632 - protein, 117 aa, synthetic construct
LQLVESGGGLVQPGGSLRLSCAASGFTLDYYAIGWFRQAPGKEREGVSYISSSGGSTNYADSVKGRFTISRDNAKNTVYLQMNSLKPEDTGVYSCAAAGGYGNSSRYWGQGTPVTVS

SEQ ID NO: 1633 - protein, 117 aa, synthetic construct
LQLVESGGGLVQPGGSLRLSCAASGFTLDYYAIGWFRQAPGKEREGVSYISSSGGSTNYADSVKGRFTISRDNAKNTVYLQMNSLKPEDTGVYSCAAAGGYGNSSRYWGQGTSATVS

SEQ ID NO: 1634 - protein, 117 aa, synthetic construct
LQLVESGGGLVQPGGSLRLSCAASGFTLDYYAIGWFRQAPGKEREGVSYISSSGGSTNYADSVKGRFTISRDNAKNTVYLQMNSLKPEDTGVYSCAAAGGYGNSSRYWGQGTSVAVS

SEQ ID NO: 1635 - protein, 117 aa, synthetic construct
LQLVESGGGLVQPGGSLRLSCAASGFTLDYYAIGWFRQAPGKEREGVSYISSSGGSTNYADSVKGRFTISRDNAKNTVYLQMNSLKPEDTGVYSCAAAGGYGNSSRYWGQGTSVIVS

SEQ ID NO: 1636 - protein, 117 aa, synthetic construct
LQLVESGGGLVQPGGSLRLSCAASGFTLDYYAIGWFRQAPGKEREGVSYISSSGGSTNYADSVKGRFTISRDNAKNTVYLQMNSLKPEDTGVYSCAAAGGYGNSSRYWGQGTSVPSP

SEQ ID NO: 1637 - protein, 117 aa, synthetic construct
LQLVESGGGLVQPGGSLRLSCAASGFTLDYYAIGWFRQAPGKEREGVSYISSSGGSTNYADSVKGRFTISRDNAKNTVYLQMNSLKPEDTGVYSCAAAGGYGNSSRYWGQGTSVTAP

SEQ ID NO: 1638 - protein, 117 aa, synthetic construct
LQLVESGGGLVQPGGSLRLSCAASGFTLDYYAIGWFRQAPGKEREGVSYISSSGGSTNYADSVKGRFTISRDNAKNTVYLQMNSLKPEDTGVYSCAAAGGYGNSSRYWGQGTSVTAS

SEQ ID NO: 1639 - protein, 117 aa, synthetic construct
LQLVESGGGLVQPGGSLRLSCAASGFTLDYYAIGWFRQAPGKEREGVSYISSSGGSTNYADSVKGRFTISRDNAKNTVYLQMNSLKPEDTGVYSCAAAGGYGNSSRYWGQGTSVTDS

SEQ ID NO: 1640 - protein, 117 aa, synthetic construct
LQLVESGGGLVQPGGSLRLSCAASGFTLDYYAIGWFRQAPGKEREGVSYISSSGGSTNYADSVKGRFTISRDNAKNTVYLQMNSLKPEDTGVYSCAAAGGYGNSSRYWGQGTSVTSP

SEQ ID NO: 1641 - protein, 116 aa, synthetic construct
LQLVESGGGLVQPGGSLRLSCAASGFTLDYYAIGWFRQAPGKEREGVSYISSSGGSTNYADSVKGRFTISRDNAKNTVYLQMNSLKPEDTGVYSCAAAGGYGNSSRYWGQGTSVTV

SEQ ID NO: 1642 - protein, 117 aa, synthetic construct
LQLVESGGGLVQPGGSLRLSCAASGFTLDYYAIGWFRQAPGKEREGVSYISSSGGSTNYADSVKGRFTISRDNAKNTVYLQMNSLKPEDTGVYSCAAAGGYGNSSRYWGQGTSVTVA

SEQ ID NO: 1643 - protein, 117 aa, synthetic construct
LQLVESGGGLVQPGGSLRLSCAASGFTLDYYAIGWFRQAPGKEREGVSYISSSGGSTNYADSVKGRFTISRDNAKNTVYLQMNSLKPEDTGVYSCAAAGGYGNSSRYWGQGTSVTVP

SEQ ID NO: 1644 - protein, 117 aa, synthetic construct
LQLVESGGGLVQPGGSLRLSCAASGFTLDYYAIGWFRQAPGKEREGVSYISSSGGSTNYADSVKGRFTISRDNAKNTVYLQMNSLKPEDTGVYSCAAAGGYGNSSRYWGQGTSVTVS

SEQ ID NO: 1645 - protein, 117 aa, synthetic construct
LQLVESGGGLVQPGGSLRLSCAASGFTLDYYAIGWFRQAPGKEREGVSYISSSGGSTNYADSVKGRFTISRDNAKNTVYLQMNSLKPEDTGVYSCAAAGGYGNSSRYWGQGTSVTVY

SEQ ID NO: 1646 - protein, 117 aa, synthetic construct
LQLVESGGGLVQPGGSLRLSCAASGFTLDYYAIGWFRQAPGKEREGVSYISSSGGSTNYADSVKGRFTISRDNAKNTVYLQMNSLKPEDTGVYSCAAAGGYGNSSRYWGQGTTVTVS

SEQ ID NO: 1647 - protein, 117 aa, synthetic construct
LQLVESGGGLVQPGGSLRLSCAASGFTLDYYAIGWFRQAPGKEREGVSYISSSGGSTNYADSVKGRFTISRDNAKNTVYLQMNSLKPEDTGVYSCAAAGGYGNSSRYWGRGTSVTVS

SEQ ID NO: 1648 - protein, 117 aa, synthetic construct
LQLVESGGGLVQPGGSLRLSCAASGFTLDYYAIGWFRQAPGKEREGVSYISSSGGSTNYADSVKGRFTISRDNAKNTVYLQMNSLKPEDTGVYSCAAAGGYGNSSRYWSQGTSVTVS

SEQ ID NO: 1649 - protein, 117 aa, synthetic construct
LQLVESGGGLVQPGGSLRLSCAASGFTLDYYAIGWFRQAPGKEREGVSYISSSGGSTNYADSVKGRFTISRDNAKNTVYLQMNSLKPEDTGVYSCAAAGGYGNSSRYWVQGTSVTVS

SEQ ID NO: 1650 - protein, 117 aa, synthetic construct
LQLVESGGGLVQPGGSLRLSCAASGFTLDYYAIGWFRQAPGKEREGVSYISSSGGSTNYADSVKGRFTISRDNAKNTVYLQMNSLKPEDTGVYSCAAAGGYGNSTRYWGQGTSVTVS

SEQ ID NO: 1651 - protein, 117 aa, synthetic construct
LQLVESGGGLVQPGGSLRLSCAASGFTLDYYAIGWFRQAPGKEREGVSYISSSGGSTNYADSVKGRFTISRDNAKNTVYLQMNSLKPEDTGVYSCAAAGGYGNTSRYWGQGTSVTVS

SEQ ID NO: 1652 - protein, 115 aa, synthetic construct
LQLVESGGGLVQPGGSLRLSCAASGFTLDYYAIGWFRQAPGKEREGVSYISSSGGSTNYADSVKGRFTISRDNAKNTVYLQMNSLKPEDTGVYSCAAAGGYVMDYWGQGTSVTVS

SEQ ID NO: 1653 - protein, 117 aa, synthetic construct
LQLVESGGGLVQPGGSLRLSCAASGFTLDYYAIGWFRQAPGKEREGVSYISSSGGSTNYADSVKGRFTISRDNAKNTVYLQMNSLKPEDTGVYSCAAARGYGNSSRYWGQGTSVTVS

SEQ ID NO: 1654 - protein, 117 aa, synthetic construct
LQLVESGGGLVQPGGSLRLSCAASGFTLDYYAIGWFRQAPGKEREGVSYISSSGGSTNYADSVKGRFTISRDNAKNTVYLQMNSLKPEDTGVYSCAAAVGYGNSSRYWGQGASVTVS

SEQ ID NO: 1655 - protein, 117 aa, synthetic construct
LQLVESGGGLVQPGGSLRLSCAASGFTLDYYAIGWFRQAPGKEREGVSYISSSGGSTNYADSVKGRFTISRDNAKNTVYLQMNSLKPEDTGVYSCAAAVGYGNSSRYWGQGTSVTVS

SEQ ID NO: 1656 - protein, 117 aa, synthetic construct
LQLVESGGGLVQPGGSLRLSCAASGFTLDYYAIGWFRQAPGKEREGVSYISSSGGSTNYADSVKGRFTISRDNAKNTVYLQMNSLKPEDTGVYSCAAAWGYGNSSRYWGQGTSVTVS

SEQ ID NO: 1657 - protein, 117 aa, synthetic construct
LQLVESGGGLVQPGGSLRLSCAASGFTLDYYAIGWFRQAPGKEREGVSYISSSGGSTNYADSVKGRFTISRDNAKNTVYLQMNSLKPEDTGVYSCAAVGGYGNSSRYWGQGTSVTVS

SEQ ID NO: 1658 - protein, 117 aa, synthetic construct
LQLVESGGGLVQPGGSLRLSCAASGFTLDYYAIGWFRQAPGKEREGVSYISSSGGSTNYADSVKGRFTISRDNAKNTVYLQMNSLKPEDTGVYSCATAGGYGNSSRYWGQGTSVTVS

SEQ ID NO: 1659 - protein, 117 aa, synthetic construct
LQLVESGGGLVQPGGSLRLSCAASGFTLDYYAIGWFRQAPGKEREGVSYISSSGGSTNYADSVKGRFTISRDNAKNTVYLQMNSLKPEDTGVYSCEAAGGYGNSSRYWGQGTSVTVS

SEQ ID NO: 1660 - protein, 117 aa, synthetic construct
LQLVESGGGLVQPGGSLRLSCAASGFTLDYYAIGWFRQAPGKEREGVSYISSSGGSTNYADSVKGRFTISRDNAKNTVYLQMNSLKPEDTGVYSCSAAGGYGNSSRYWGQGTSVTVS

SEQ ID NO: 1661 - protein, 117 aa, synthetic construct
LQLVESGGGLVQPGGSLRLSCAASGFTLDYYAIGWFRQAPGKEREGVSYISSSGGSTNYADSVKGRFTISRDNAKNTVYLQMNSLKPEDTGVYSCVAAGGYGNSSRYWGQGTSVTVS

SEQ ID NO: 1662 - protein, 117 aa, synthetic construct
LQLVESGGGLVQPGGSLRLSCAASGFTLDYYAIGWFRQAPGKEREGVSYISSSGGSTNYADSVKGRFTISRDNAKNTVYLQMNSLKPEDTGVYSRAAAGGYGNSSRYWGQGTSVTVS

SEQ ID NO: 1663 - protein, 117 aa, synthetic construct
LQLVESGGGLVQPGGSLRLSCAASGFTLDYYAIGWFRQAPGKEREGVSYISSSGGSTNYADSVKGRFTISRDNAKNTVYLQMNSLKPEDTGVYSSAAAGGYGNSSRYWGQGTSVTVS

SEQ ID NO: 1664 - protein, 117 aa, synthetic construct
LQLVESGGGLVQPGGSLRLSCAASGFTLDYYAIGWFRQAPGKEREGVSYISSSGGSTNYADSVKGRFTISRDNAKNTVYLQMNSLKPEDTGVYSWAAAGGYGNSSRYWGQGTSVTVS

SEQ ID NO: 1665 - protein, 117 aa, synthetic construct
LQLVESGGGLVQPGGSLRLSCAASGFTLDYYAIGWFRQAPGKEREGVSYISSSGGSTNYADSVKGRFTISRDNAKNTVYLQMNSLKPEDTGVYSYAAAGGYGNSSRYWGQGTSVTVS

SEQ ID NO: 1666 - protein, 117 aa, synthetic construct
LQLVESGGGLVQPGGSLRLSCAASGFTLDYYAIGWFRQAPGKEREGVSYISSSGGSTNYADSVKGRFTISRDNAKNTVYLQMNSLKPEETGVYSCAAAGGYGNSSRYWGQGTSVTVS

SEQ ID NO: 1667 - protein, 117 aa, synthetic construct
LQLVESGGGLVQPGGSLRLSCAASGFTLDYYAIGWFRQAPGKEREGVSYISSSGGSTNYADSVKGRFTISRDNAKNTVYLQMNSLKPEVTGVYSCAAAGGYGNSSRYWGQGTSVTVS

SEQ ID NO: 1668 - protein, 117 aa, synthetic construct
LQLVESGGGLVQPGGSLRLSCAASGFTLDYYAIGWFRQAPGKEREGVSYISSSGGSTNYADSVKGRFTISRDNAKNTVYLQMNSLKPKDTGVYSCAAAGGYGNSSRYWGQGTSVTVS

SEQ ID NO: 1669 - protein, 117 aa, synthetic construct
LQLVESGGGLVQPGGSLRLSCAASGFTLDYYAIGWFRQAPGKEREGVSYISSSGGSTNYADSVKGRFTISRDNAKNTVYLQMNSLKQEDTGVYSCAAAGGYGNSSRYWGQGTSVTVS

SEQ ID NO: 1670 - protein, 117 aa, synthetic construct
LQLVESGGGLVQPGGSLRLSCAASGFTLDYYAIGWFRQAPGKEREGVSYISSSGGSTNYADSVKGRFTISRDNAKNTVYLQMNSLNPEDTGVYSCAAAGGYGNSSRYWGQGTSVTVS

SEQ ID NO: 1671 - protein, 117 aa, synthetic construct
LQLVESGGGLVQPGGSLRLSCAASGFTLDYYAIGWFRQAPGKEREGVSYISSSGGSTNYADSVKGRFTISRDNAKNTVYLQMNSLRPEDTGVYSCAAAGGYGNSSRYWGQGTSVTVS

SEQ ID NO: 1672 - protein, 117 aa, synthetic construct
LQLVESGGGLVQPGGSLRLSCAASGFTLDYYAIGWFRQAPGKEREGVSYISSSGGSTNYADSVKGRFTISRDNAKNTVYLQMNSPKPEDTGVYSCAAAGGYGNSSRYWGQGTSVTVS

SEQ ID NO: 1673 - protein, 117 aa, synthetic construct
LQLVESGGGLVQPGGSLRLSCAASGFTLDYYAIGWFRQAPGKEREGVSYISSSGGSTNYADSVKGRFTISRDNAKNTVYLQMSSLKPEDTGVYSCAAAGGYGNSSRYWGQGTSVTVS

SEQ ID NO: 1674 - protein, 117 aa, synthetic construct
LQLVESGGGLVQPGGSLRLSCAASGFTLDYYAIGWFRQAPGKEREGVSYISSSGGSTNYADSVKGRFTISRDNAKNTVYLQVNSLKPEDTGVYSCAAAGGYGNSSRYWGQGTSVTVS

SEQ ID NO: 1675 - protein, 117 aa, synthetic construct
LQLVESGGGLVQPGGSLRLSCAASGFTLDYYAIGWFRQAPGKEREGVSYISSSGGSTNYADSVKGRFTISRDNAKNTVYLRMNSLKPEDTGVYSCAAAGGYGNSSRYWGQGTSVTVS

SEQ ID NO: 1676 - protein, 117 aa, synthetic construct
LQLVESGGGLVQPGGSLRLSCAASGFTLDYYAIGWFRQAPGKEREGVSYISSSGGSTNYADSVKGRFTISRDNAKNTVYPQMNSLKPEDTGVYSCAAAGGYGNSSRYWGQGTSVTVS

SEQ ID NO: 1677 - protein, 117 aa, synthetic construct
LQLVESGGGLVQPGGSLRLSCAASGFTLDYYAIGWFRQAPGKEREGVSYISSSGGSTNYADSVKGRFTISRDNAKTTVYLQMNSLKPEDTGVYSCAAAGGYGNSSRYWGQGTSVTVS

SEQ ID NO: 1678 - protein, 117 aa, synthetic construct
LQLVESGGGLVQPGGSLRLSCAASGFTLDYYAIGWFRQAPGKEREGVSYISSSGGSTNYADSVKGRFTISRDNSKNTVYLQMNSLKPEDTGVYSCAAAGGYGNSSRYWGQGTSVTVS

SEQ ID NO: 1679 - protein, 117 aa, synthetic construct
LQLVESGGGLVQPGGSLRLSCAASGFTLDYYAIGWFRQAPGKEREGVSYISSSGGSTNYADSVKGRFTISRDNTKNTVYLQMNSLKPEDTGVYSCAAAGGYGNSSRYWGQGTSVTVS

SEQ ID NO: 1680 - protein, 117 aa, synthetic construct
LQLVESGGGLVQPGGSLRLSCAASGFTLDYYAIGWFRQAPGKEREGVSYISSSGGSTNYADSVKGRFTISRDTAKNTVYLQMNSLKPEDTGVYSCAAAGGYGNSSRYWGQGTSVTVS

SEQ ID NO: 1681 - protein, 117 aa, synthetic construct
LQLVESGGGLVQPGGSLRLSCAASGFTLDYYAIGWFRQAPGKEREGVSYISSSGGSTNYADSVKGRFTISRGNAKNTVYLQMNSLKPEDTGVYSCAAAGGYGNSSRYWGQGTSVTVS

SEQ ID NO: 1682 - protein, 117 aa, synthetic construct
LQLVESGGGLVQPGGSLRLSCAASGFTLDYYAIGWFRQAPGKEREGVSYISSSGGSTNYADSVKGRFTISWDNAKNTVYLQMNSLKPEDTGVYSCAAAGGYGNSSRYWGQGTSVTVS

SEQ ID NO: 1683 - protein, 117 aa, synthetic construct
LQLVESGGGLVQPGGSLRLSCAASGFTLDYYAIGWFRQAPGKEREGVSYISSSGGSTNYADSVKGRFTITRDNAKNTVYLQMNSLKPEDTGVYSCAAAGGYGNSSRYWGQGTSVTVS

SEQ ID NO: 1684 - protein, 117 aa, synthetic construct
LQLVESGGGLVQPGGSLRLSCAASGFTLDYYAIGWFRQAPGKEREGVSYISSSGGSTNYADSVKGRFTTSRDNAKNTVYLQMNSLKPEDTGVYSCAAAGGYGNSSRYWGQGTSVTVS

SEQ ID NO: 1685 - protein, 117 aa, synthetic construct
LQLVESGGGLVQPGGSLRLSCAASGFTLDYYAIGWFRQAPGKEREGVSYISSSGGSTNYADSVKGWFTISRDNAKNTVYLQMNSLKPEDTGVYSCAAAGGYGNSSRYWGQGTSVTVS

SEQ ID NO: 1686 - protein, 117 aa, synthetic construct
LQLVESGGGLVQPGGSLRLSCAASGFTLDYYAIGWFRQAPGKEREGVSYISSSGGSTNYADSVKRRFTISRDNAKNTVYLQMNSLKPEDTGVYSCAAAGGYGNSSRYWGQGTSVTVS

SEQ ID NO: 1687 - protein, 117 aa, synthetic construct
LQLVESGGGLVQPGGSLRLSCAASGFTLDYYAIGWFRQAPGKEREGVSYISSSGGSTNYADSVKVRFTISRDNAKNTVYLQMNSLKPEDTGVYSCAAAGGYGNSSRYWGQGTSVTVS

SEQ ID NO: 1688 - protein, 117 aa, synthetic construct
LQLVESGGGLVQPGGSLRLSCAASGFTLDYYAIGWFRQAPGKEREGVSYISSSGGSTNYADSVNGRFTISRDNAKNTVYLQMNSLKPEDTGVYSCAAAGGYGNSSRYWGQGTSVTVS

SEQ ID NO: 1689 - protein, 117 aa, synthetic construct
LQLVESGGGLVQPGGSLRLSCAASGFTLDYYAIGWFRQAPGKEREGVSYISSSGGSTNYADSVRGRFTISRDNAKNTVYLQMNSLKPEDTGVYSCAAAGGYGNSSRYWGQGTSVTVS

SEQ ID NO: 1690 - protein, 117 aa, synthetic construct
LQLVESGGGLVQPGGSLRLSCAASGFTLDYYAIGWFRQAPGKEREGVSYISSSGGSTNYAESVKGRFTISRDNAKNTVYLQMNSLKPEDTGVYSCAAAGGYGNSSRYWGQGASVTVS

SEQ ID NO: 1691 - protein, 117 aa, synthetic construct
LQLVESGGGLVQPGGSLRLSCAASGFTLDYYAIGWFRQAPGKEREGVSYISSSGGSTNYPDSVKGRFTISRDNAKNTVYLQMNSLKPEDTGVYSCAAAGGYGNSSRYWGQGTSVTVS

SEQ ID NO: 1692 - protein, 117 aa, synthetic construct
LQLVESGGGLVQPGGSLRLSCAASGFTLDYYAIGWFRQAPGKEREGVSYISSSGGSTNYTDSVKGRFTISRDNAKNTVYLQMNSLKPEDTGVYSCAAAGGYGNSSRYWGQGTSVTVS

SEQ ID NO: 1693 - protein, 117 aa, synthetic construct
LQLVESGGGLVQPGGSLRLSCAASGFTLDYYAIGWFRQAPGKEREGVSYISSSGGSTSYADSVKGRFTISRDNAKNTVYLQMNSLKPEDTGVYSCAAAGGYGNSSRYWGQGTSVTVS

SEQ ID NO: 1694 - protein, 117 aa, synthetic construct
LQLVESGGGLVQPGGSLRLSCAASGFTLDYYAIGWFRQAPGKEREGVSYISSSSGSTNYADSVKGRFTISRDNAKNTVYLQMNSLKPEDTGVYSCAAAGGYGNSSRYWGQGTSVTVS

SEQ ID NO: 1695 - protein, 117 aa, synthetic construct
LQLVESGGGLVQPGGSLRLSCAASGFTLDYYAIGWFRQAPGKEREGVSYISSSVGSTNYADSVKGRFTISRDNAKNTVYLQMNSLKPEDTGVYSCAAAGGYGNSSRYWGQGTSVTVS

SEQ ID NO: 1696 - protein, 117 aa, synthetic construct
LQLVESGGGLVQPGGSLRLSCAASGFTLDYYAIGWFRQAPGKEREGVSYISSTGGSTNYADSVKGRFTISRDNAKNTVYLQMNSLKPEDTGVYSCAAAGGYGNSSRYWGQGTSVTVS

SEQ ID NO: 1697 - protein, 117 aa, synthetic construct
LQLVESGGGLVQPGGSLRLSCAASGFTLDYYAIGWFRQAPGKEREGVSYTSSSGGSTNYADSVKGRFTISRDNAKNTVYLQMNSLKPEDTGVYSCAAAGGYGNSSRYWGQGTSVTVS

SEQ ID NO: 1698 - protein, 117 aa, synthetic construct
LQLVESGGGLVQPGGSLRLSCAASGFTLDYYAIGWFRQAPGKEREVVSYISSSGGSTNYADSVKGRFTISRDNAKNTVYLQMNSLKPEDTGVYSCAAAGGYGNSSRYWGQGTSVTVS

SEQ ID NO: 1699 - protein, 117 aa, synthetic construct
LQLVESGGGLVQPGGSLRLSCAASGFTLDYYAIGWFRQAPGKEREWVSYISSSGGSTNYADSVKGRFTISRDNAKNTVYLQMNSLKPEDTGVYSCAAAGGYGNSSRYWGQGTSVTVS

SEQ ID NO: 1700 - protein, 117 aa, synthetic construct
LQLVESGGGLVQPGGSLRLSCAASGFTLDYYAIGWFRQAPGKERGGVSYISSSGGSTNYADSVKGRFTISRDNAKNTVYLQMNSLKPEDTGVYSCAAAGGYGNSSRYWGQGTSVTVS

SEQ ID NO: 1701 - protein, 117 aa, synthetic construct
LQLVESGGGLVQPGGSLRLSCAASGFTLDYYAIGWFRQAPGKGREGVSYISSSGGSTNYADSVKGRFTISRDNAKNTVYLQMNSLKPEDTGVYSCAAAGGYGNSSRYWGQGTSVTVS

SEQ ID NO: 1702 - protein, 117 aa, synthetic construct
LQLVESGGGLVQPGGSLRLSCAASGFTLDYYAIGWFRQAPGNEREGVSYISSSGGSTNYADSVKGRFTISRDNAKNTVYLQMNSLKPEDTGVYSCAAAGGYGNSSRYWGQGTSVTVS

SEQ ID NO: 1703 - protein, 117 aa, synthetic construct
LQLVESGGGLVQPGGSLRLSCAASGFTLDYYAIGWFRQAPGREREGVSYISSSGGSTNYADSVKGRFTISRDNAKNTVYLQMNSLKPEDTGVYSCAAAGGYGNSSRYWGQGTSVTVS

SEQ ID NO: 1704 - protein, 117 aa, synthetic construct
LQLVESGGGLVQPGGSLRLSCAASGFTLDYYAIGWFRQAPRKEREGVSYISSSGGSTNYADSVKGRFTISRDNAKNTVYLQMNSLKPEDTGVYSCAAAGGYGNSSRYWGQGTSVTVS

SEQ ID NO: 1705 - protein, 117 aa, synthetic construct
LQLVESGGGLVQPGGSLRLSCAASGFTLDYYAIGWFRQAPVKEREGVSYISSSGGSTNYADSVKGRFTISRDNAKNTVYLQMNSLKPEDTGVYSCAAAGGYGNSSRYWGQGTSVTVS

SEQ ID NO: 1706 - protein, 117 aa, synthetic construct
LQLVESGGGLVQPGGSLRLSCAASGFTLDYYAIGWFRQAPWKEREGVSYISSSGGSTNYADSVKGRFTISRDNAKNTVYLQMNSLKPEDTGVYSCAAAGGYGNSSRYWGQGTSVTVS

SEQ ID NO: 1707 - protein, 117 aa, synthetic construct
LQLVESGGGLVQPGGSLRLSCAASGFTLDYYAIGWFRQASGKEREGVSYISSSGGSTNYADSVKGRFTISRDNAKNTVYLQMNSLKPEDTGVYSCAAAGGYGNSSRYWGQGTSVTVS

SEQ ID NO: 1708 - protein, 117 aa, synthetic construct
LQLVESGGGLVQPGGSLRLSCAASGFTLDYYAIGWFRQATGKEREGVSYISSSGGSTNYADSVKGRFTISRDNAKNTVYLQMNSLKPEDTGVYSCAAAGGYGNSSRYWGQGTSVTVS

SEQ ID NO: 1709 - protein, 117 aa, synthetic construct
LQLVESGGGLVQPGGSLRLSCAASGFTLDYYAIGWFRQSPGKEREGVSYISSSGGSTNYADSVKGRFTISRDNAKNTVYLQMNSLKPEDTGVYSCAAAGGYGNSSRYWGQGTSVTVS

SEQ ID NO: 1710 - protein, 117 aa, synthetic construct
LQLVESGGGLVQPGGSLRLSCAASGFTLDYYAIGWFRQTPGKEREGVSYISSSGGSTNYADSVKGRFTISRDNAKNTVYLQMNSLKPEDTGVYSCAAAGGYGNSSRYWGQGTSVTVS

SEQ ID NO: 1711 - protein, 117 aa, synthetic construct
LQLVESGGGLVQPGGSLRLSCAASGFTLDYYAIGWFRRAPGKEREGVSYISSSGGSTNYADSVKGRFTISRDNAKNTVYLQMNSLKPEDTGVYSCAAAGGYGNSSRYWGQGTSVTVS

SEQ ID NO: 1712 - protein, 117 aa, synthetic construct
LQLVESGGGLVQPGGSLRLSCAASGFTLDYYAIGWLRQAPGKEREGVSYISSSGGSTNYADSVKGRFTISRDNAKNTVYLQMNSLKPEDTGVYSCAAAGGYGNSSRYWGQGTSVTVS

SEQ ID NO: 1713 - protein, 117 aa, synthetic construct
LQLVESGGGLVQPGGSLRLSCAASGFTLDYYAIGWVRQAPGKEREGVSYISSSGGSTNYADSVKGRFTISRDNAKNTVYLQMNSLKPEDTGVYSCAAAGGYGNSSRYWGQGTSVTVS

SEQ ID NO: 1714 - protein, 117 aa, synthetic construct
LQLVESGGGLVQPGGSLRLSCAASGFTLDYYAISWFRQAPGKEREGVSYISSSGGSTNYADSVKGRFTISRDNAKNTVYLQMNSLKPEDTGVYSCAAAGGYGNSSRYWGQGTSVTVS

SEQ ID NO: 1715 - protein, 117 aa, synthetic construct
LQLVESGGGLVQPGGSLRLSCAASGFTLDYYATGWFRQAPGKEREGVSYISSSGGSTNYADSVKGRFTISRDNAKNTVYLQMNSLKPEDTGVYSCAAAGGYGNSSRYWGQGTSVTVS

SEQ ID NO: 1716 - protein, 117 aa, synthetic construct
LQLVESGGGLVQPGGSLRLSCAASGFTLDYYAVGWFRQAPGKEREGVSYISSSGGSTNYADSVKGRFTISRDNAKNTVYLQMNSLKPEDTGVYSCAAAGGYGNSSRYWGQGTSVTVS

SEQ ID NO: 1717 - protein, 117 aa, synthetic construct
LQLVESGGGLVQPGGSLRLSCAASGFTLDYYSIGWFRQAPGKEREGVSYISSSGGSTNYADSVKGRFTISRDNAKNTVYLQMNSLKPEDTGVYSCAAAGGYGNSSRYWGQGTSVTVS

SEQ ID NO: 1718 - protein, 117 aa, synthetic construct
LQLVESGGGLVQPGGSLRLSCAASGFTLDYYVIGWFRQAPGKEREGVSYISSSGGSTNYADSVKGRFTISRDNAKNTVYLQMNSLKPEDTGVYSCAAAGGYGNSSRYWGQGTSVTVS

SEQ ID NO: 1719 - protein, 117 aa, synthetic construct
LQLVESGGGLVQPGGSLRLSCAASGFTLGYYAIGWFRQAPGKEREGVSYISSSGGSTNYADSVKGRFTISRDNAKNTVYLQMNSLKPEDTGVYSCAAAGGYGNSSRYWGQGTSVTVS

SEQ ID NO: 1720 - protein, 117 aa, synthetic construct
LQLVESGGGLVQPGGSLRLSCAASGFTLVYYAIGWFRQAPGKEREGVSYISSSGGSTNYADSVKGRFTISRDNAKNTVYLQMNSLKPEDTGVYSCAAAGGYGNSSRYWGQGTSVTVS

SEQ ID NO: 1721 - protein, 117 aa, synthetic construct
LQLVESGGGLVQPGGSLRLSCAASGFTLYYYAIGWFRQAPGKEREGVSYISSSGGSTNYADSVKGRFTISRDNAKNTVYLQMNSLKPEDTGVYSCAAAGGYGNSSRYWGQGTSVTVS

SEQ ID NO: 1722 - protein, 117 aa, synthetic construct
LQLVESGGGLVQPGGSLRLSCAASGFTQDYYAIGWFRQAPGKEREGVSYISSSGGSTNYADSVKGRFTISRDNAKNTVYLQMNSLKPEDTGVYSCAAAGGYGNSSRYWGQGTSVTVS

SEQ ID NO: 1723 - protein, 117 aa, synthetic construct
LQLVESGGGLVQPGGSLRLSCAASGFTRDYYAIGWFRQAPGKEREGVSYISSSGGSTNYADSVKGRFTISRDNAKNTVYLQMNSLKPEDTGVYSCAAAGGYGNSSRYWGQGTSVTVS

SEQ ID NO: 1724 - protein, 117 aa, synthetic construct
LQLVESGGGLVQPGGSLRLSCAASRFTLDYYAIGWFRQAPGKEREGVSYISSSGGSTNYADSVKGRFTISRDNAKNTVYLQMNSLKPEDTGVYSCAAAGGYGNSSRYWGQGTSVTVS

SEQ ID NO: 1725 - protein, 117 aa, synthetic construct
LQLVESGGGLVQPGGSLRLSCAASVFTLDYYAIGWFRQAPGKEREGVSYISSSGGSTNYADSVKGRFTISRDNAKNTVYLQMNSLKPEDTGVYSCAAAGGYGNSSRYWGQGTSVTVS

SEQ ID NO: 1726 - protein, 117 aa, synthetic construct
LQLVESGGGLVQPGGSLRLSCAASWFTLDYYAIGWFRQAPGKEREGVSYISSSGGSTNYADSVKGRFTISRDNAKNTVYLQMNSLKPEDTGVYSCAAAGGYGNSSRYWGQGTSVTVS

SEQ ID NO: 1727 - protein, 117 aa, synthetic construct
LQLVESGGGLVQPGGSLRLSCADSGFTLDYYAIGWFRQAPGKEREGVSYISSSGGSTNYADSVKGRFTISRDNAKNTVYLQMNSLKPEDTGVYSCAAAGGYGNSSRYWGQGTSVTVS

SEQ ID NO: 1728 - protein, 117 aa, synthetic construct
LQLVESGGGLVQPGGSLRLSCASSGFTLDYYAIGWFRQAPGKEREGVSYISSSGGSTNYADSVKGRFTISRDNAKNTVYLQMNSLKPEDTGVYSCAAAGGYGNSSRYWGQGTSVTVS

SEQ ID NO: 1729 - protein, 117 aa, synthetic construct
LQLVESGGGLVQPGGSLRLSCATSGFTLDYYAIGWFRQAPGKEREGVSYISSSGGSTNYADSVKGRFTISRDNAKNTVYLQMNSLKPEDTGVYSCAAAGGYGNSSRYWGQGTSVTVS

SEQ ID NO: 1730 - protein, 117 aa, synthetic construct
LQLVESGGGLVQPGGSLRLSCAVSGFTLDYYAIGWFRQAPGKEREGVSYISSSGGSTNYADSVKGRFTISRDNAKNTVYLQMNSLKPEDTGVYSCAAAGGYGNSSRYWGQGTSVTVS

SEQ ID NO: 1731 - protein, 117 aa, synthetic construct
LQLVESGGGLVQPGGSLRLSCPASGFTLDYYAIGWFRQAPGKEREGVSYISSSGGSTNYADSVKGRFTISRDNAKNTVYLQMNSLKPEDTGVYSCAAAGGYGNSSRYWGQGTSVTVS

SEQ ID NO: 1732 - protein, 117 aa, synthetic construct
LQLVESGGGLVQPGGSLRLSCSASGFTLDYYAIGWFRQAPGKEREGVSYISSSGGSTNYADSVKGRFTISRDNAKNTVYLQMNSLKPEDTGVYSCAAAGGYGNSSRYWGQGTSVTVS

SEQ ID NO: 1733 - protein, 117 aa, synthetic construct
LQLVESGGGLVQPGGSLRLSCTASGFTLDYYAIGWFRQAPGKEREGVSYISSSGGSTNYADSVKGRFTISRDNAKNTVYLQMNSLKPEDTGVYSCAAAGGYGNSSRYWGQGTSVTVS

SEQ ID NO: 1734 - protein, 117 aa, synthetic construct
LQLVESGGGLVQPGGSLRLSCVASGFTLDYYAIGWFRQAPGKEREGVSYISSSGGSTNYADSVKGRFTISRDNAKNTVYLQMNSLKPEDTGVYSCAAAGGYGNSSRYWGQGTSVTVS

SEQ ID NO: 1735 - protein, 117 aa, synthetic construct
LQLVESGGGLVQPGGSLRLSRAASGFTLDYYAIGWFRQAPGKEREGVSYISSSGGSTNYADSVKGRFTISRDNAKNTVYLQMNSLKPEDTGVYSCAAAGGYGNSSRYWGQGTSVTVS

SEQ ID NO: 1736 - protein, 117 aa, synthetic construct
LQLVESGGGLVQPGGSLSLSCAASGFTLDYYAIGWFRQAPGKEREGVSYISSSGGSTNYADSVKGRFTISRDNAKNTVYLQMNSLKPEDTGVYSCAAAGGYGNSSRYWGQGTSVTVS

SEQ ID NO: 1737 - protein, 117 aa, synthetic construct
LQLVESGGGLVQPGVSLRLSCAASGFTLDYYAIGWFRQAPGKEREGVSYISSSGGSTNYADSVKGRFTISRDNAKNTVYLQMNSLKPEDTGVYSCAAAGGYGNSSRYWGQGTSVTVS

SEQ ID NO: 1738 - protein, 117 aa, synthetic construct
LQLVESGGGLVQPGWSLRLSCAASGFTLDYYAIGWFRQAPGKEREGVSYISSSGGSTNYADSVKGRFTISRDNAKNTVYLQMNSLKPEDTGVYSCAAAGGYGNSSRYWGQGTSVTVS

SEQ ID NO: 1739 - protein, 117 aa, synthetic construct
LQLVESGGGLVQPVGSLRLSCAASGFTLDYYAIGWFRQAPGKEREGVSYISSSGGSTNYADSVKGRFTISRDNAKNTVYLQMNSLKPEDTGVYSCAAAGGYGNSSRYWGQGTSVTVS

SEQ ID NO: 1740 - protein, 117 aa, synthetic construct
LQLVESGGGLVQSGGSLRLSCAASGFTLDYYAIGWFRQAPGKEREGVSYISSSGGSTNYADSVKGRFTISRDNAKNTVYLQMNSLKPEDTGVYSCAAAGGYGNSSRYWGQGTSVTVS

SEQ ID NO: 1741 - protein, 117 aa, synthetic construct
LQLVESGGGLVQTGGSLRLSCAASGFTLDYYAIGWFRQAPGKEREGVSYISSSGGSTNYADSVKGRFTISRDNAKNTVYLQMNSLKPEDTGVYSCAAAGGYGNSSRYWGQGTSVTVS

SEQ ID NO: 1742 - protein, 117 aa, synthetic construct
LQLVESGGGLVRPGGSLRLSCAASGFTLDYYAIGWFRQAPGKEREGVSYISSSGGSTNYADSVKGRFTISRDNAKNTVYLQMNSLKPEDTGVYSCAAAGGYGNSSRYWGQGTSVTVS

SEQ ID NO: 1743 - protein, 117 aa, synthetic construct
LQLVESGGVLVQPGGSLRLSCAASGFTLDYYAIGWFRQAPGKEREGVSYISSSGGSTNYADSVKGRFTISRDNAKNTVYLQMNSLKPEDTGVYSCAAAGGYGNSSRYWGQGTSVTVS

SEQ ID NO: 1744 - protein, 117 aa, synthetic construct
LQLVESGRGLVQPGGSLRLSCAASGFTLDYYAIGWFRQAPGKEREGVSYISSSGGSTNYADSVKGRFTISRDNAKNTVYLQMNSLKPEDTGVYSCAAAGGYGNSSRYWGQGTSVTVS

SEQ ID NO: 1745 - protein, 117 aa, synthetic construct
LQLVESSGGLVQPGGSLRLSCAASGFTLDYYAIGWFRQAPGKEREGVSYISSSGGSTNYADSVKGRFTISRDNAKNTVYLQMNSLKPEDTGVYSCAAAGGYGNSSRYWGQGTSVTVS

SEQ ID NO: 1746 - protein, 117 aa, synthetic construct
LQLVESVGGLVQPGGSLRLSCAASGFTLDYYAIGWFRQAPGKEREGVSYISSSGGSTNYADSVKGRFTISRDNAKNTVYLQMNSLKPEDTGVYSCAAAGGYGNSSRYWGQGTSVTVS

SEQ ID NO: 1747 - protein, 117 aa, synthetic construct
LQLVGSGGGLVQPGGSLRLSCAASGFTLDYYAIGWFRQAPGKEREGVSYISSSGGSTNYADSVKGRFTISRDNAKNTVYLQMNSLKPEDTGVYSCAAAGGYGNSSRYWGQGTSVTVS

SEQ ID NO: 1748 - protein, 117 aa, synthetic construct
LQLVVSGGGLVQPGGSLRLSCAASGFTLDYYAIGWFRQAPGKEREGVSYISSSGGSTNYADSVKGRFTISRDNAKNTVYLQMNSLKPEDTGVYSCAAAGGYGNSSRYWGQGTSVTVS

SEQ ID NO: 1749 - protein, 115 aa, synthetic construct
LVESGGGLVQPGGSLRLSCAASGFTLDYYAIGWFRQAPGKEREGVSYISSSGGSTNYADSVKGRFTISRDNAKNTVYLQMNSLKPEDTGVYSCAAAGGYGNSSRYWGQGASVTVS

SEQ ID NO: 1750 - protein, 115 aa, synthetic construct
LVESGGGLVQPGGSLRLSCAASGFTLDYYAIGWFRQAPGKEREGVSYISSSGGSTNYADSVKGRFTISRDNAKNTVYLQMNSLKPEDTGVYSCAAAGGYGNSSRYWGQGTSVTVS

SEQ ID NO: 1751 - protein, 115 aa, synthetic construct
LVESGGGLVQPGGSLRLSCAASGFTLDYYAIGWFRQAPGKEREGVSYISSSGGSTNYADSVKGRFTISRDNAKNTVYLQMNSLKPEDTGVYSCTAAGGYGNSSRYWGQGTSVTVS

SEQ ID NO: 1752 - protein, 115 aa, synthetic construct
LVESGGGLVQPGGSLRLSCAASGFTLDYYTIGWFRQAPGKEREGVSYISSSGGSTNYADSVKGRFTISRDNAKNTVYLQMNSLKPEDTGVYSCAAAGGYGNSSRYWGQGTSVTVS

SEQ ID NO: 1753 - protein, 115 aa, synthetic construct
LVESGVGLVQPGGSLRLSCAASGFTLDYYAIGWFRQAPGKEREGVSYISSSGGSTNYADSVKGRFTISRDNAKNTVYLQMNSLKPEDTGVYSCAAAGGYGNSSRYWGQGTSVTVS

SEQ ID NO: 1754 - protein, 116 aa, synthetic construct
QLVESGGGLVQPGGSLRLSCAASGFTLDYYAIGWFRQAPGKEREGVSYISSSGGSTNYADSVKGRFTISRDNAKNTVYLQMNSLKPEDTGVYSCAAAGGYGNSSRYWGQGTSVTVS

SEQ ID NO: 1755 - protein, 114 aa, synthetic construct
VESGGGLVQPGGSLRLSCAASGFTLDYYAIGWFRQAPGKEREGVSYISSSGGSTNYADSVKGRFTISRDNAKNTVYLQMNSLKPEDTGVYSCAAAGGYGNSSRYWGQGTSVTVS

SEQ ID NO: 1756 - protein, 117 aa, synthetic construct
VKLEESGGGSVQAGGSLRLSCAASGFTLDYYAIGWFRQAPGKEREGVSYISSSGGSTNYADSVKGRFTISRDNAKNTVYLQMNSLKPEDTGVYSCAAAGGYGNSSRYWGQGTSVTVS

SEQ ID NO: 1757 - protein, 117 aa, synthetic construct
VQLVESGGGLVQPGGSLRLSCAASGFTLDYYAIGWFRQAPGKEREGVSYISSSGGSTNYADSVKGRFTISRDNAKNTVYLQMNSLKPEDTGVYSCAAAGGYGNSSRYWGQGTSVTVS

SEQ ID NO: 1758 - protein, 117 aa, synthetic construct
EVQLVESGGGLVQPGGSLRLSCAASGSIFSVNAMGYYRQISTKQRNLVAAINTGGGSTYYADSVKGRFTISWDNANNTLFLQMNSLKSEDTAVYYCAAEDFGNSKTYWGQGTLVTVS

SEQ ID NO: 1759 - protein, 116 aa, synthetic construct
LQLVESGGGLVQPGGSLRLSCAASGSIFSVNAMGYYRQISTKQRNLVAAINTGGGSTYYADSVKGRFTISWDNANNTLFLQMNSLKSEDTAVYYCAAEDFGNSKTYWGQGTLVTVS

SEQ ID NO: 1760 - protein, 115 aa, synthetic construct
QLVESGGGLVQPGGSLRLSCAASGSIFSVNAMGYYRQISTKQRNLVAAINTGGGSTYYADSVKGRFTISWDNANNTLFLQMNSLKSEDTAVYYCAAEDFGNSKTYWGQGTLVTVS

SEQ ID NO: 1761 - protein, 116 aa, synthetic construct
VKLVESGGGLVQPGGSLRLSCAASGSIFSVNAMGYYRQISTKQRNLVAAINTGGGSTYYADSVKGRFTISWDNANNTLFLQMNSLKSEDTAVYYCAAEDFGNSKTYWGQGTLVTVS

SEQ ID NO: 1762 - protein, 116 aa, synthetic construct
VQLVESGGGLAQPGGSLRLSCAASGSIFSVNAMGYYRQISTKQRNLVAAINTGGGSTYYADSVKGRFTISWDNANNTLFLQMNSLKSEDTAVYYCAAEDFGNSKTYWGQGTLVTVS

SEQ ID NO: 1763 - protein, 116 aa, synthetic construct
VQLVESGGGLVQPGGSLRLACAASGSIFSVNAMGYYRQISTKQRNLVAAINTGGGSTYYADSVKGRFTISWDNANNTLFLQMNSLKSEDTAVYYCAAEDFGNSKTYWGQGTLVTVS

SEQ ID NO: 1764 - protein, 116 aa, synthetic construct
VQLVESGGGLVQPGGSLRLACAASGSILSINAMDWYRQVPGKQRELVAAINAGGGSTYYADSVKGRFTISWDNANNTLFLQMNSLKSEDTAVYYCAAEDFGNSKTYWGQGTLVTVS

SEQ ID NO: 1765 - protein, 116 aa, synthetic construct
VQLVESGGGLVQPGGSLRLACAASGSILSINAMGYYRQISTKQRNLVAAINTGGGSTYYADSVKGRFTISWDNANNTLFLQMNSLKSEDTAVYYCAAEDFGNSKTYWGQGTLVTVS

SEQ ID NO: 1766 - protein, 116 aa, synthetic construct
VQLVESGGGLVQPGGSLRLFCAASGSIFSVNAMGYYRQISTKQRNLVAAINTGGGSTYYADSVKGRFTISWDNANNTLFLQMNSLKSEDTAVYYCAAEDFGNSKTYWGQGTLVTVS

SEQ ID NO: 1767 - protein, 116 aa, synthetic construct
VQLVESGGGLVQPGGSLRLSCAASGSIFLVNAMGYYRQISTKQRNLVAAINTGGGSTYYADSVKGRFTISWDNANNTLFLQMNSLKSEDTAVYYCAAEDFGNSKTYWGQGTLVTVS

SEQ ID NO: 1768 - protein, 116 aa, synthetic construct
VQLVESGGGLVQPGGSLRLSCAASGSIFSVNAMGSYRQISTKQRNLVAAINTGGGSTYYADSVKGRFTISWDNANNTLFLQMNSLKSEDTAVYYCAAEDFGNSKTYWGQGTLVTVS

SEQ ID NO: 1769 - protein, 116 aa, synthetic construct
VQLVESGGGLVQPGGSLRLSCAASGSIFSVNAMGYYRQISTKQRNLVAAINTGGGSTYYADSVKGRCTISWDNANNTLFLQMNSLKSEDTAVYYCAAEDFGNSKTYWGQGTLVTVS

SEQ ID NO: 1770 - protein, 116 aa, synthetic construct
VQLVESGGGLVQPGGSLRLSCAASGSIFSVNAMGYYRQISTKQRNLVAAINTGGGSTYYADSVKGRFNISWDNANNTLFLQMNSLKSEDTAVYYCAAEDFGNSKTYWGQGTLVTVS

SEQ ID NO: 1771 - protein, 116 aa, synthetic construct
VQLVESGGGLVQPGGSLRLSCAASGSIFSVNAMGYYRQISTKQRNLVAAINTGGGSTYYADSVKGRFTISWDNANKTLFLQMNSLKSEDTAVYYCAAEDFGNSKTYWGQGTLVTVS

SEQ ID NO: 1772 - protein, 116 aa, synthetic construct
VQLVESGGGLVQPGGSLRLSCAASGSIFSVNAMGYYRQISTKQRNLVAAINTGGGSTYYADSVKGRFTISWDNANNTLFLQMKSLKSEDTAVYYCAAEDFGNSKTYWGQGTLVTVS

SEQ ID NO: 1773 - protein, 113 aa, synthetic construct
VQLVESGGGLVQPGGSLRLSCAASGSIFSVNAMGYYRQISTKQRNLVAAINTGGGSTYYADSVKGRFTISWDNANNTLFLQMNSLKPEDTAVYSCAAAGGFRYWGQGTLVTVS

SEQ ID NO: 1774 - protein, 116 aa, synthetic construct
VQLVESGGGLVQPGGSLRLSCAASGSIFSVNAMGYYRQISTKQRNLVAAINTGGGSTYYADSVKGRFTISWDNANNTLFLQMNSLKPEDTAVYYCAAEDFGNSKTYWGQGTLVTVS

SEQ ID NO: 1775 - protein, 115 aa, synthetic construct
VQLVESGGGLVQPGGSLRLSCAASGSIFSVNAMGYYRQISTKQRNLVAAINTGGGSTYYADSVKGRFTISWDNANNTLFLQMNSLKPEDTAVYYCAAVGDYGRRAMGQGTSVTVS

SEQ ID NO: 1776 - protein, 115 aa, synthetic construct
VQLVESGGGLVQPGGSLRLSCAASGSIFSVNAMGYYRQISTKQRNLVAAINTGGGSTYYADSVKGRFTISWDNANNTLFLQMNSLKPEDTAVYYCAGVGDYGRRAMGQGTSVTVS

SEQ ID NO: 1777 - protein, 116 aa, synthetic construct
VQLVESGGGLVQPGGSLRLSCAASGSIFSVNAMGYYRQISTKQRNLVAAINTGGGSTYYADSVKGRFTISWDNANNTLFLQMNSLKSEATAVYYCAAEDFGNSKTYWGQGTLVTVS

SEQ ID NO: 1778 - protein, 116 aa, synthetic construct
VQLVESGGGLVQPGGSLRLSCAASGSIFSVNAMGYYRQISTKQRNLVAAINTGGGSTYYADSVKGRFTISWDNANNTLFLQMNSLKSEDAAVYYCAAEDFGNSKTYWGQGTLVTVS

SEQ ID NO: 1779 - protein, 116 aa, synthetic construct
VQLVESGGGLVQPGGSLRLSCAASGSIFSVNAMGYYRQISTKQRNLVAAINTGGGSTYYADSVKGRFTISWDNANNTLFLQMNSLKSEDPAVYYCAAEDFGNSKTYWGQGTLVTVS

SEQ ID NO: 1780 - protein, 116 aa, synthetic construct
VQLVESGGGLVQPGGSLRLSCAASGSIFSVNAMGYYRQISTKQRNLVAAINTGGGSTYYADSVKGRFTISWDNANNTLFLQMNSLKSEDTAAYYCAAEDFGNSKTYWGQGTLVTVS

SEQ ID NO: 1781 - protein, 116 aa, synthetic construct
VQLVESGGGLVQPGGSLRLSCAASGSIFSVNAMGYYRQISTKQRNLVAAINTGGGSTYYADSVKGRFTISWDNANNTLFLQMNSLKSEDTAGYYCAAEDFGNSKTYWGQGTLVTVS

SEQ ID NO: 1782 - protein, 116 aa, synthetic construct
VQLVESGGGLVQPGGSLRLSCAASGSIFSVNAMGYYRQISTKQRNLVAAINTGGGSTYYADSVKGRFTISWDNANNTLFLQMNSLKSEDTAMYSCIYCRYDGEFAYWGQGTLVTVS

SEQ ID NO: 1783 - protein, 116 aa, synthetic construct
VQLVESGGGLVQPGGSLRLSCAASGSIFSVNAMGYYRQISTKQRNLVAAINTGGGSTYYADSVKGRFTISWDNANNTLFLQMNSLKSEDTAVYSCAAEDFGNSKTYWGQGTLVTVS

SEQ ID NO: 1784 - protein, 116 aa, synthetic construct
VQLVESGGGLVQPGGSLRLSCAASGSIFSVNAMGYYRQISTKQRNLVAAINTGGGSTYYADSVKGRFTISWDNANNTLFLQMNSLKSEDTAVYYCAAEDFGNSKAYWGQGTLVTVS

SEQ ID NO: 1785 - protein, 116 aa, synthetic construct
VQLVESGGGLVQPGGSLRLSCAASGSIFSVNAMGYYRQISTKQRNLVAAINTGGGSTYYADSVKGRFTISWDNANNTLFLQMNSLKSEDTAVYYCAAEDFGNSKTHWGQGTLVTVS

SEQ ID NO: 1786 - protein, 116 aa, synthetic construct
VQLVESGGGLVQPGGSLRLSCAASGSIFSVNAMGYYRQISTKQRNLVAAINTGGGSTYYADSVKGRFTISWDNANNTLFLQMNSLKSEDTAVYYCAAEDFGNSKTYWGPGTLVTVS

SEQ ID NO: 1787 - protein, 116 aa, synthetic construct
VQLVESGGGLVQPGGSLRLSCAASGSIFSVNAMGYYRQISTKQRNLVAAINTGGGSTYYADSVKGRFTISWDNANNTLFLQMNSLKSEDTAVYYCAAEDFGNSKTYWGQGALVTVS

SEQ ID NO: 1788 - protein, 116 aa, synthetic construct
VQLVESGGGLVQPGGSLRLSCAASGSIFSVNAMGYYRQISTKQRNLVAAINTGGGSTYYADSVKGRFTISWDNANNTLFLQMNSLKSEDTAVYYCAAEDFGNSKTYWGQGTLVTVS

SEQ ID NO: 1789 - protein, 116 aa, synthetic construct
VQLVESGGGLVQPGGSLRLSCAASGSIFSVNAMGYYRQISTKQRNLVAAINTGGGSTYYADSVKGRFTISWDNANNTLFLQMNSLKSEDTAVYYCAAEDFGNSKTYWGQVTLVTVS

SEQ ID NO: 1790 - protein, 116 aa, synthetic construct
VQLVESGGGLVQPGGSLRLSCAASGSIFSVNAMGYYRQISTKQRNLVAAINTGGGSTYYADSVKGRFTISWDNANNTLFLQMNSLKSEDTAVYYCAAEDFGNSKTYWRQGTLVTVS

SEQ ID NO: 1791 - protein, 116 aa, synthetic construct
VQLVESGGGLVQPGGSLRLSCAASGSIFSVNAMGYYRQISTKQRNLVAAINTGGGSTYYADSVKGRFTISWDNANNTLFLQMNSLKSEDTAVYYCAAEDFGNTKTYWGQGTLVTVS

SEQ ID NO: 1792 - protein, 116 aa, synthetic construct
VQLVESGGGLVQPGGSLRLSCAASGSIFSVNAMGYYRQISTKQRNLVAAINTGGGSTYYADSVKGRFTISWDNANNTLFLQMNSLKSEDTAVYYCAAEYFGNSKTYWGQGTLVTVS

SEQ ID NO: 1793 - protein, 115 aa, synthetic construct
VQLVESGGGLVQPGGSLRLSCAASGSIFSVNAMGYYRQISTKQRNLVAAINTGGGSTYYADSVKGRFTISWDNANNTLFLQMNSLKSEDTAVYYCAGVGDYGRRAMGQGTSVTVS

SEQ ID NO: 1794 - protein, 116 aa, synthetic construct
VQLVESGGGLVQPGGSLRLSCAASGSIFSVNAMGYYRQISTKQRNLVAAINTGGGSTYYADSVKGRFTISWDNANNTLFLQTNSLKSEDTAVYYCAAEDFGNSKTYWGQGTLVTVS

SEQ ID NO: 1795 - protein, 116 aa, synthetic construct
VQLVESGGGLVQPGGSLRLSCAASGSIFSVNAMGYYRQISTKQRNLVAAINTGGGSTYYADSVKGRFTISWDNANNTLFPQMNSLKSEDTAVYYCAAEDFGNSKTYWGQGTLVTVS

SEQ ID NO: 1796 - protein, 116 aa, synthetic construct
VQLVESGGGLVQPGGSLRLSCAASGSIFSVNAMGYYRQISTKQRNLVAAINTGGGSTYYADSVKGRFTISWDNANNTLLLQMNSLKSEDTAVYYCAAEDFGNSKTYWGQGTLVTVS

SEQ ID NO: 1797 - protein, 116 aa, synthetic construct
VQLVESGGGLVQPGGSLRLSCAASGSIFSVNAMGYYRQISTKQRNLVAAINTGGGSTYYADSVKGRFTISWDNANNTLVLQMNSLKSEDTAGYYCAAEDFGNSKTYWGQGTLVTVS

SEQ ID NO: 1798 - protein, 116 aa, synthetic construct
VQLVESGGGLVQPGGSLRLSCAASGSIFSVNAMGYYRQISTKQRNLVAAINTGGGSTYYADSVKGRFTISWDNANNTLVLQMNSLKSEDTAVYYCAAEDFGNSKTYWGQGTLVTVS

SEQ ID NO: 1799 - protein, 116 aa, synthetic construct
VQLVESGGGLVQPGGSLRLSCAASGSIFSVNAMGYYRQISTKQRNLVAAINTGGGSTYYADSVKGRFTISWDNANNTSFLQMNSLKSEDTAVYYCAAEDFGNSKTYWGQGTLVTVS

SEQ ID NO: 1800 - protein, 115 aa, synthetic construct
VQLVESGGGLVQPGGSLRLSCAASGSIFSVNAMGYYRQISTKQRNLVAAINTGGGSTYYADSVKGRFTISWDNANNTVFLQMNSLKPEDTAVYYCAGVGDYGRRAMGQGTSVTVS

SEQ ID NO: 1801 - protein, 115 aa, synthetic construct
VQLVESGGGLVQPGGSLRLSCAASGSIFSVNAMGYYRQISTKQRNLVAAINTGGGSTYYADSVKGRFTISWDNANNTVFLQMNSLKSEDTAVYYCAGVGDYGRRAMGQGTSVTVS

SEQ ID NO: 1802 - protein, 116 aa, synthetic construct
VQLVESGGGLVQPGGSLRLSCAASGSIFSVNAMGYYRQISTKQRNLVDAINTGGGSTYYADSVKGRFTISWDNANNTLFLQMNSLKSEDTAVYYCAAEDFGNSKTYWGQGTLVTVS

SEQ ID NO: 1803 - protein, 111 aa, synthetic construct
EVQLVESGGGSVEAGGSLRLSCTASGFTFDDSDMGWNRQAPGNERELVSTIRSDGSTYYVDSVKGRFTISQDNAKNTVYLQMNSLKPEDTAVYYCAADWPPGGQGTLVTVS

SEQ ID NO: 1804 - protein, 111 aa, synthetic construct
EVQLVESGGGSVEAGGSLRLSCTASGFTFDDSDMGWYRQAPGNECELVATIRSDGSTYYVDSVKGRFTISQDNAKNTVYLQMNSLKPEDTAVYYCAADWPPGGQGTLVTVS

SEQ ID NO: 1805 - protein, 111 aa, synthetic construct
EVQLVESGGGSVEAGGSLRLSCTASGFTFDDSDMGWYRQAPGNECELVSTIRSDGSTYYVDSVKGRFTISQDNAKNTVYLQMNSLKPEDTAVYYCAADWPPGGQGTLVTVS

SEQ ID NO: 1806 - protein, 111 aa, synthetic construct
EVQLVESGGGSVEAGGSLRLSCTASGFTFDDSDMGWYRQAPGNERELVATIRSDGSTYYGDSVKGRFSISQDNAKNTIYLQMNSLKPEDTAVYYCAADWPPGGQGTLVTVS

SEQ ID NO: 1807 - protein, 111 aa, synthetic construct
EVQLVESGGGSVEAGGSLRLSCTASGFTFDDSDMGWYRQAPGNERELVATIRSDGSTYYGDSVKGRFSISQDNAKNTVYLQMNSLKPEDTAMYYCAADWPPGGQGTLVTVS

SEQ ID NO: 1808 - protein, 111 aa, synthetic construct
EVQLVESGGGSVEAGGSLRLSCTASGFTFDDSDMGWYRQAPGNERELVATIRSDGSTYYGDSVKGRFSISQDNAKNTVYLQMNSLKPEDTAVYYCAADWPPGGQGTLVTVS

SEQ ID NO: 1809 - protein, 111 aa, synthetic construct
EVQLVESGGGSVEAGGSLRLSCTASGFTFDDSDMGWYRQAPGNERELVATIRSDGSTYYGDSVKGRFTISQDNAKNTIYLQMNSLKPEDTAVYYCAADWPPGGQGTLVTVS

SEQ ID NO: 1810 - protein, 111 aa, synthetic construct
EVQLVESGGGSVEAGGSLRLSCTASGFTFDDSDMGWYRQAPGNERELVATIRSDGSTYYGDSVKGRFTISQDNAKNTVYLQMNSLKPEDTAVYYCAADWPPGGQGTLVTVS

SEQ ID NO: 1811 - protein, 111 aa, synthetic construct
EVQLVESGGGSVEAGGSLRLSCTASGFTFDDSDMGWYRQAPGNERELVATIRSDGSTYYVDSVKGRFSISQDNAKNTVYLQMNSLKPEDTAVYYCAADWPPGGQGTLVTVS

SEQ ID NO: 1812 - protein, 111 aa, synthetic construct
EVQLVESGGGSVEAGGSLRLSCTASGFTFDDSDMGWYRQAPGNERELVATIRSDGSTYYVDSVKGRFTISQDNAKNTVYLQMNSLKPEDTAVYYCAADWPPGGQGTLVTVS

SEQ ID NO: 1813 - protein, 111 aa, synthetic construct
EVQLVESGGGSVEAGGSLRLSCTASGFTFDDSDMGWYRQAPGNERELVSTIRSDGSTYYGDSVKGRFSISQDNAKNTIYLQMNSLKPEDTAVYYCAADWPPGGQGTLVTVS

SEQ ID NO: 1814 - protein, 111 aa, synthetic construct
EVQLVESGGGSVEAGGSLRLSCTASGFTFDDSDMGWYRQAPGNERELVSTIRSDGSTYYGDSVKGRFSISQDNAKNTVYLQMNSLKPEDTAVYYCAADWPPGGQGTLVTVS

SEQ ID NO: 1815 - protein, 111 aa, synthetic construct
EVQLVESGGGSVEAGGSLRLSCTASGFTFDDSDMGWYRQAPGNERELVSTIRSDGSTYYGDSVKGRFTISQDNAKNTVYLQMNSLKPEDTAVYYCAADWPPGGQGTLVTVS

SEQ ID NO: 1816 - protein, 111 aa, synthetic construct
EVQLVESGGGSVEAGGSLRLSCTASGFTFDDSDMGWYRQAPGNERELVSTIRSDGSTYYVDSVKGRFSISQDNAKNTVYLQMNSLKPEDTAVYYCAADWPPGGQGTLVTVS

SEQ ID NO: 1817 - protein, 111 aa, synthetic construct
EVQLVESGGGSVEAGGSLRLSCTASGFTFDDSDMGWYRQAPGNERELVSTIRSDGSTYYVDSVKGRFTISQDNAKNTIYLQMNSLKPEDTAVYYCAADWPPGGQGTLVTVS

SEQ ID NO: 1818 - protein, 111 aa, synthetic construct
EVQLVESGGGSVEAGGSLRLSCTASGFTFDDSDMGWYRQAPGNERELVSTIRSDGSTYYVDSVKGRFTISQDNAKNTVYLQMNSLKPEDTAMYYCAADWPPGGQGTLVTVS

SEQ ID NO: 1819 - protein, 111 aa, synthetic construct
EVQLVESGGGSVEAGGSLRLSCTASGFTFDDSDMGWYRQAPGNERELVSTIRSDGSTYYVDSVKGRFTISQDNAKNTVYLQMNSLKPEDTAVYYCAADWPPGGQGTLVTVS

SEQ ID NO: 1820 - protein, 111 aa, synthetic construct
EVQLVESGGGSVEAGGSLRLSCTASGFTFDDSDMGWYRQAPGNERELVSTISSDGSAYYGDSVKGRFSISQDNAKNTVYLQMNSLKPEDTAVYYCAADWPPGGQGTLVTVS

SEQ ID NO: 1821 - protein, 111 aa, synthetic construct
EVQLVESGGGSVEAGGSLRLSCTASGFTFDDSDMGWYRQAPGNERELVSTISSDGSTYYADSVKGRFSISQDNAKNTVYLQMNSLKPEDTAVYYCAADWPPGGQGTLVTVS

SEQ ID NO: 1822 - protein, 111 aa, synthetic construct
EVQLVESGGGSVEAGGSLRLSCTASGFTFDDSDMGWYRQAPGNERELVSTISSDGSTYYGDSVKGRFSISQDNAKNTVYLQMNSLKPEDTAVYYCAADWPPGGQGTLVTVS

SEQ ID NO: 1823 - protein, 111 aa, synthetic construct
EVQLVESGGGSVEAGGSLRLSCTASGFTFDDSDMGWYRQAPGNERELVSTISSDGSTYYVDSVKGRFTISQDNAKNTVYLQMNSLKPEDTAVYYCAADWPPGGQGTLVTVS

SEQ ID NO: 1824 - protein, 111 aa, synthetic construct
EVQLVESGGGSVEAGGSLRLSCTASGFTFDDSDMGWYRQARGNERELVATIRSDGSTYYGDSVKGRFSISQDNAKNTVYLQMNSLKPEDTAVYYCAADWPPGGQGTLVTVS

SEQ ID NO: 1825 - protein, 111 aa, synthetic construct
EVQLVESGGGSVEAGGSLRLSCTASGFTFDDSDMGWYRQARGNERELVSTIRSDGSTYYADSVKGRFTISQDNAKNTVYLQMNSLKPEDTAVYYCAADWPPGGQGTLVTVS

SEQ ID NO: 1826 - protein, 111 aa, synthetic construct
EVQLVESGGGSVEAGGSLRLSCTASGFTFDDSDMGWYRQARGNERELVSTIRSDGSTYYGDSVKGRFSISQDNAKNTVYLQMNSLKPEDTAVYYCAADWPPGGQGTLVTVS

SEQ ID NO: 1827 - protein, 111 aa, synthetic construct
EVQLVESGGGSVEAGGSLRLSCTASGFTFDDSDMGWYRQARGNERELVSTIRSDGSTYYGDSVKGRFTISQDNAKNTVYLQMNSLKPEDTAVYYCAADWPPGGQGTLVTVS

SEQ ID NO: 1828 - protein, 111 aa, synthetic construct
EVQLVESGGGSVEAGGSLRLSCTASGFTFDDSDMGWYRQARGNERELVSTIRSDGSTYYVDSVKGRFTISQDNAKNTVYLQMNSLKPEDTAVYYCAADWPPGGQGTLVTVS

SEQ ID NO: 1829 - protein, 111 aa, synthetic construct
EVQLVESGGGSVEAGGSLRLSCTASGFTFDDSDMGWYRQARGNERELVSTISSDGSTYYADSVKGRFSISQDNAKNTVYLQMNSLKPEDTAVYYCAADWPPGGQGTLVTVS

SEQ ID NO: 1830 - protein, 111 aa, synthetic construct
EVQLVESGGGSVEAGGSLRLSCTASGFTFDDSDMGWYRQARGNERELVSTISSDGSTYYGDSVKGRFSISQDNAKNTVYLQMNSLKPEDTAVYYCAADWPPGGQGTLVTVS

SEQ ID NO: 1831 - protein, 111 aa, synthetic construct
EVQLVESGGGSVEAGGSLRLSCTASGFTFDDSDMGWYRQARGNERELVSTISSDGSTYYVDSVKGRFTISQDNAKNTVYLQMNSLKPEDTAVYYCAADWPPGGQGTLVTVS

SEQ ID NO: 1832 - protein, 111 aa, synthetic construct
EVQLVESGGGSVEAGGSLRLSCTASGFTFDVSDMGWYRQAPGNERELVATIRSDGSTYYGDSVKGRFSISQDNAKNTVYLQMNSLKPEDTAVYYCAADWPPGGQGTLVTVS

SEQ ID NO: 1833 - protein, 111 aa, synthetic construct
EVQLVESGGGSVEAGGSLRLSCTASGFTFDVSDMGWYRQAPGNERELVATIRSDGSTYYGDSVKGRFTISQDNAKNTVYLQMNSLKPEDTAVYYCAADWPPGGQGTLVTVS

SEQ ID NO: 1834 - protein, 111 aa, synthetic construct
EVQLVESGGGSVEAGGSLRLSCTASGFTFDVSDMGWYRQAPGNERELVSTIRSDGSTYYGDSVKGRFSISQDNAKNTVYLQMNSLKPEDTAVYYCAADWPPGGQGTLVTVS

SEQ ID NO: 1835 - protein, 111 aa, synthetic construct
EVQLVESGGGSVEAGGSLRLSCTASGFTFDVSDMGWYRQAPGNERELVSTIRSDGSTYYVDSVKGRFSISQDNAKNTVYLQMNSLKPEDTAVYYCAADWPPGGQGTLVTVS

SEQ ID NO: 1836 - protein, 111 aa, synthetic construct
EVQLVESGGGSVEAGGSLRLSCTASGFTFDVSDMGWYRQAPGNERELVSTIRSDGSTYYVDSVKGRFTISQDNAKNTIYLQMNSLKPEDTAVYYCAADWPPGGQGTLVTVS

SEQ ID NO: 1837 - protein, 111 aa, synthetic construct
EVQLVESGGGSVEAGGSLRLSCTASGFTFDVSDMGWYRQAPGNERELVSTIRSDGSTYYVDSVKGRFTISQDNAKNTVYLQMNSLKPEDTAMYYCAADWPPGGQGTLVTVS

SEQ ID NO: 1838 - protein, 111 aa, synthetic construct
EVQLVESGGGSVEAGGSLRLSCTASGFTFDVSDMGWYRQAPGNERELVSTIRSDGSTYYVDSVKGRFTISQDNAKNTVYLQMNSLKPEDTAVYYCAADWPPGGQGTLVTVS

SEQ ID NO: 1839 - protein, 111 aa, synthetic construct
EVQLVESGGGSVEAGGSLRLSCTASGFTFDVSDMGWYRQAPGNERELVSTISSDGSTYYGDSVKGRFSISQDNAKNTVYLQMNSLKPEDTAVYYCAADWPPGGQGTLVTVS

SEQ ID NO: 1840 - protein, 111 aa, synthetic construct
EVQLVESGGGSVEAGGSLRLSCTASGFTFDVSDMGWYRQAPGNERELVSTISSDGSTYYVDSVKGRFTISQDNAKNTVYLQMNSLKPEDTAVYYCAADWPPGGQGTLVTVS

SEQ ID NO: 1841 - protein, 111 aa, synthetic construct
EVQLVESGGGSVEAGGSLRLSCTASGFTFDVSDMGWYRQARGNERELVSTIRSDGSTYYGDSVKGRFSISQDNAKNTVYLQMNSLKPEDTAVYYCAADWPPGGQGTLVTVS

SEQ ID NO: 1842 - protein, 111 aa, synthetic construct
EVQLVESGGGSVEAGGSLRLSCTASGFTFDVSDMGWYRQARGNERELVSTISSDGSTYYVDSVKGRFTISQDNAKNTVYLQMNSLKPEDTAVYYCAADWPPGGQGTLVTVS

SEQ ID NO: 1843 - protein, 111 aa, synthetic construct
EVQLVESGGGSVEAGGSLRLSRTASGFTFDDSDMGWYRQAPGNERELVATIRSDGSTYYGDSVKGRFSISQDNAKNTVYLQMNSLKPEDTAVYYCAADWPPGGQGTLVTVS

SEQ ID NO: 1844 - protein, 111 aa, synthetic construct
EVQLVESGGGSVEAGGSLRLSRTASGFTFDDSDMGWYRQAPGNERELVATIRSDGSTYYGDSVKGRFTISQDNAKNTVYLQMNSLKPEDTAVYYCAADWPPGGQGTLVTVS

SEQ ID NO: 1845 - protein, 111 aa, synthetic construct
EVQLVESGGGSVEAGGSLRLSRTASGFTFDDSDMGWYRQAPGNERELVSTIRSDGSTYYVDSVKGRFTISQDNAKNTVYLQMNSLKPEDTAVYYCAADWPPGGQGTLVTVS

SEQ ID NO: 1846 - protein, 111 aa, synthetic construct
EVQLVESGGGSVQAGGSLRLSCTASGFTFDDSDMGWYRQAPGNECELVATIRSDGSTYYGDSVKGRFSISQDNAKNTVYLQMNSLKPEDTAVYYCAADWPPGGQGTLVTVS

SEQ ID NO: 1847 - protein, 111 aa, synthetic construct
EVQLVESGGGSVQAGGSLRLSCTASGFTFDDSDMGWYRQAPGNECELVATIRSDGSTYYGDSVKGRFTISQDNAKNTVYLQMNSLKPEDTAVYYCAADWPPGGQGTLVTVS

SEQ ID NO: 1848 - protein, 111 aa, synthetic construct
EVQLVESGGGSVQAGGSLRLSCTASGFTFDDSDMGWYRQAPGNECELVSTIRSDGSTYYGDSVKGRFSISQDNAKNTVYLQMNSLKPEDTAVYYCAADWPPGGQGTLVTVS

SEQ ID NO: 1849 - protein, 111 aa, synthetic construct
EVQLVESGGGSVQAGGSLRLSCTASGFTFDDSDMGWYRQAPGNECELVSTIRSDGSTYYVDSVKGRFTISQDNAKNTVYLQMNSLKPEDTAVYYCAADWPPGGQGTLVTVS

SEQ ID NO: 1850 - protein, 111 aa, synthetic construct
EVQLVESGGGSVQAGGSLRLSCTASGFTFDDSDMGWYRQAPGNECELVSTVSSDGSTYYGDSVKGRFSISQDNAKNTVYLQMNSLKPEDTAVYYCAADWPPGGQGTLVTVS

SEQ ID NO: 1851 - protein, 111 aa, synthetic construct
EVQLVESGGGSVQAGGSLRLSCTASGFTFDDSDMGWYRQAPGNERELVATIRSDGSTYYADSVKGRFSISQDNAKNTVYLQMNSLKPEDTAVYYCAADWPPGGQGTLVTVS

SEQ ID NO: 1852 - protein, 111 aa, synthetic construct
EVQLVESGGGSVQAGGSLRLSCTASGFTFDDSDMGWYRQAPGNERELVATIRSDGSTYYADSVKGRFTISQDNAKNTIYLQMNSLKPEDTAVYYCAADWPPGGQGTLVTVS

SEQ ID NO: 1853 - protein, 111 aa, synthetic construct
EVQLVESGGGSVQAGGSLRLSCTASGFTFDDSDMGWYRQAPGNERELVATIRSDGSTYYGDSVKGRFSISQDNAKNTIYLQMNSLKPEDTAMYYCAADWPPGGQGTLVTVS

SEQ ID NO: 1854 - protein, 111 aa, synthetic construct
EVQLVESGGGSVQAGGSLRLSCTASGFTFDDSDMGWYRQAPGNERELVATIRSDGSTYYGDSVKGRFSISQDNAKNTIYLQMNSLKPEDTAVYYCAADWPPGGQGTLVTVS

SEQ ID NO: 1855 - protein, 111 aa, synthetic construct
EVQLVESGGGSVQAGGSLRLSCTASGFTFDDSDMGWYRQAPGNERELVATIRSDGSTYYGDSVKGRFSISQDNAKNTVYLQMNSLKPEDTAMYYCAADWPPGGQGTLVTVS

SEQ ID NO: 1856 - protein, 111 aa, synthetic construct
EVQLVESGGGSVQAGGSLRLSCTASGFTFDDSDMGWYRQAPGNERELVATIRSDGSTYYGDSVKGRFSISQDNAKNTVYLQMNSLKPEDTAVYYCAADWPPGGPGTLVTVS

SEQ ID NO: 1857 - protein, 111 aa, synthetic construct
EVQLVESGGGSVQAGGSLRLSCTASGFTFDDSDMGWYRQAPGNERELVATIRSDGSTYYGDSVKGRFSISQDNAKNTVYLQMNSLKPEDTAVYYCAADWPPGGQGTLVTVS

SEQ ID NO: 1858 - protein, 111 aa, synthetic construct
EVQLVESGGGSVQAGGSLRLSCTASGFTFDDSDMGWYRQAPGNERELVATIRSDGSTYYGDSVKGRFTISQDNAKNTIYLQMNSLKPEDTAVYYCAADWPPGGQGTLVTVS

SEQ ID NO: 1859 - protein, 111 aa, synthetic construct
EVQLVESGGGSVQAGGSLRLSCTASGFTFDDSDMGWYRQAPGNERELVATIRSDGSTYYGDSVKGRFTISQDNAKNTVYLQMNSLKPEDTAMYYCAADWPPGGQGTLVTVS

SEQ ID NO: 1860 - protein, 111 aa, synthetic construct
EVQLVESGGGSVQAGGSLRLSCTASGFTFDDSDMGWYRQAPGNERELVATIRSDGSTYYGDSVKGRFTISQDNAKNTVYLQMNSLKPEDTAVYYCAADWPPGGPGTLVTVS

SEQ ID NO: 1861 - protein, 111 aa, synthetic construct
EVQLVESGGGSVQAGGSLRLSCTASGFTFDDSDMGWYRQAPGNERELVATIRSDGSTYYGDSVKGRFTISQDNAKNTVYLQMNSLKPEDTAVYYCAADWPPGGQGTLVTVS

SEQ ID NO: 1862 - protein, 111 aa, synthetic construct
EVQLVESGGGSVQAGGSLRLSCTASGFTFDDSDMGWYRQAPGNERELVATIRSDGSTYYVDSVKGRFSISQDNAKNTVYLQMNSLKPEDTAVYYCAADWPPGGQGTLVTVS

SEQ ID NO: 1863 - protein, 111 aa, synthetic construct
EVQLVESGGGSVQAGGSLRLSCTASGFTFDDSDMGWYRQAPGNERELVATIRSDGSTYYVDSVKGRFTISQDNAKNTIYLQMNSLKPEDTAVYYCAADWPPGGQGTLVTVS

SEQ ID NO: 1864 - protein, 111 aa, synthetic construct
EVQLVESGGGSVQAGGSLRLSCTASGFTFDDSDMGWYRQAPGNERELVATIRSDGSTYYVDSVKGRFTISQDNAKNTVYLQMNSLKPEDTAVYYCAADWPPGGQGTLVTVS

SEQ ID NO: 1865 - protein, 111 aa, synthetic construct
EVQLVESGGGSVQAGGSLRLSCTASGFTFDDSDMGWYRQAPGNERELVATISSDGSTYYGDSVKGRFSISQDNAKNTVYLQMNSLKPEDTAVYYCAADWPPGGQGTLVTVS

SEQ ID NO: 1866 - protein, 111 aa, synthetic construct
EVQLVESGGGSVQAGGSLRLSCTASGFTFDDSDMGWYRQAPGNERELVSTIFSDGSTYYGDSVKGRFSISQDNAKNTVYLQMNSLKPEDTAVYYCAADWPPGGQGTLVTVS

SEQ ID NO: 1867 - protein, 111 aa, synthetic construct
EVQLVESGGGSVQAGGSLRLSCTASGFTFDDSDMGWYRQAPGNERELVSTIFSDGSTYYVDSVKGRFTISQDNAKNTVYLQMNSLKPEDTAVYYCAADWPPGGQGTLVTVS

SEQ ID NO: 1868 - protein, 111 aa, synthetic construct
EVQLVESGGGSVQAGGSLRLSCTASGFTFDDSDMGWYRQAPGNERELVSTIRSDGSTYYGDSVKGRFSISQDNAKNTIYLQMNSLKPEDTAVYYCAADWPPGGQGTLVTVS

SEQ ID NO: 1869 - protein, 111 aa, synthetic construct
EVQLVESGGGSVQAGGSLRLSCTASGFTFDDSDMGWYRQAPGNERELVSTIRSDGSTYYGDSVKGRFSISQDNAKNTVYLQMNSLKPEDTAMYYCAADWPPGGQGTLVTVS

SEQ ID NO: 1870 - protein, 111 aa, synthetic construct
EVQLVESGGGSVQAGGSLRLSCTASGFTFDDSDMGWYRQAPGNERELVSTIRSDGSTYYGDSVKGRFSISQDNAKNTVYLQMNSLKPEDTAVYYCAADWPPGGQGTLVTVS

SEQ ID NO: 1871 - protein, 111 aa, synthetic construct
EVQLVESGGGSVQAGGSLRLSCTASGFTFDDSDMGWYRQAPGNERELVSTIRSDGSTYYGDSVKGRFTISQDNAKNTIYLQMNSLKPEDTAMYYCAADWPPGGQGTLVTVS

SEQ ID NO: 1872 - protein, 111 aa, synthetic construct
EVQLVESGGGSVQAGGSLRLSCTASGFTFDDSDMGWYRQAPGNERELVSTIRSDGSTYYGDSVKGRFTISQDNAKNTVYLQMNSLKPEDTAVYYCAADWPPGGQGTLVTVS

SEQ ID NO: 1873 - protein, 111 aa, synthetic construct
EVQLVESGGGSVQAGGSLRLSCTASGFTFDDSDMGWYRQAPGNERELVSTIRSDGSTYYVDSVKGRFTISQANAKNTVYLQMNSLKPEDTAVYYCAADWPPGGQGTLVTVS

SEQ ID NO: 1874 - protein, 111 aa, synthetic construct
EVQLVESGGGSVQAGGSLRLSCTASGFTFDDSDMGWYRQAPGNERELVSTIRSDGSTYYVDSVKGRFTISQDNAKNTIYLQMNSLKPEDTAMYYCAADWPPGGQGTLVTVS

SEQ ID NO: 1875 - protein, 111 aa, synthetic construct
EVQLVESGGGSVQAGGSLRLSCTASGFTFDDSDMGWYRQAPGNERELVSTIRSDGSTYYVDSVKGRFTISQDNAKNTIYLQMNSLKPEDTAVYYCAADWPPGGQGTLVTVS

SEQ ID NO: 1876 - protein, 111 aa, synthetic construct
EVQLVESGGGSVQAGGSLRLSCTASGFTFDDSDMGWYRQAPGNERELVSTIRSDGSTYYVDSVKGRFTISQDNAKNTVYLQMNSLKPEDTAMYYCAADWPPGGQGTLVTVS

SEQ ID NO: 1877 - protein, 111 aa, synthetic construct
EVQLVESGGGSVQAGGSLRLSCTASGFTFDDSDMGWYRQAPGNERELVSTIRSDGSTYYVDSVKGRFTISQDNAKNTVYLQMNSLKPEDTAVYYCAADWPPGGPGTLVTVS

SEQ ID NO: 1878 - protein, 117 aa, synthetic construct
EVQLVESGGGSVQAGGSLRLSCTASGFTFDDSDMGWYRQAPGNERELVSTISSDGSAYYADSVKGRFTISQDNAKNTVYLQMNSLKPEDTGVYSCAAAGGYGNSSRYWGQGTSVTVS

SEQ ID NO: 1879 - protein, 111 aa, synthetic construct
EVQLVESGGGSVQAGGSLRLSCTASGFTFDDSDMGWYRQAPGNERELVSTISSDGSAYYGDSVKGRFSISQDNAKNTVYLQMNSLKPEDTAVYYCAADWPPGGQGTLVTVS

SEQ ID NO: 1880 - protein, 111 aa, synthetic construct
EVQLVESGGGSVQAGGSLRLSCTASGFTFDDSDMGWYRQAPGNERELVSTISSDGSTYYGDSVKGRFSISQDNAKNTVYLQMNSLKPEDTAVYYCAADWPPGGQGTLVTVS

SEQ ID NO: 1881 - protein, 111 aa, synthetic construct
EVQLVESGGGSVQAGGSLRLSCTASGFTFDDSDMGWYRQAPGNERELVSTISSDGSTYYGDSVKGRFTISQDNAKNTVYLQMNSLKPEDTAVYYCAADWPPGGQGTLVTVS

SEQ ID NO: 1882 - protein, 111 aa, synthetic construct
EVQLVESGGGSVQAGGSLRLSCTASGFTFDDSDMGWYRQAPGNERELVSTISSDGSTYYVDSVKGRFTISQDNAKNTVYLQMNSLKPEDTAVYYCAADWPPGGQGTLVTVS

SEQ ID NO: 1883 - protein, 111 aa, synthetic construct
EVQLVESGGGSVQAGGSLRLSCTASGFTFDDSDMGWYRQARGNERELVATIRSDGSTYYGDSVKGRFSISQDNAKNTIYLQMNSLKPEDTAMYYCAADWPPGGQGTLVTVS

SEQ ID NO: 1884 - protein, 111 aa, synthetic construct
EVQLVESGGGSVQAGGSLRLSCTASGFTFDDSDMGWYRQARGNERELVATIRSDGSTYYGDSVKGRFSISQDNAKNTVYLQMNSLKPEDTAVYYCAADWPPGGQGTLVTVS

SEQ ID NO: 1885 - protein, 111 aa, synthetic construct
EVQLVESGGGSVQAGGSLRLSCTASGFTFDDSDMGWYRQARGNERELVATIRSDGSTYYGDSVKGRFTISQDNAKNTVYLQMNSLKPEDTAVYYCAADWPPGGQGTLVTVS

SEQ ID NO: 1886 - protein, 111 aa, synthetic construct
EVQLVESGGGSVQAGGSLRLSCTASGFTFDDSDMGWYRQARGNERELVATIRSDGSTYYVDSVKGRFTISQDNAKNTVYLQMNSLKPEDTAVYYCAADWPPGGQGTLVTVS

SEQ ID NO: 1887 - protein, 111 aa, synthetic construct
EVQLVESGGGSVQAGGSLRLSCTASGFTFDDSDMGWYRQARGNERELVSTIRSDGSTYYADSVKGRFTISQDNAKNTVYLQMNSLKPEDTAVYYCAADWPPGGQGTLVTVS

SEQ ID NO: 1888 - protein, 111 aa, synthetic construct
EVQLVESGGGSVQAGGSLRLSCTASGFTFDDSDMGWYRQARGNERELVSTIRSDGSTYYGDSVKGRFSISQDNAKNTVYLQMNSLKPEDTAVYYCAADWPPGGQGTLVTVS

SEQ ID NO: 1889 - protein, 111 aa, synthetic construct
EVQLVESGGGSVQAGGSLRLSCTASGFTFDDSDMGWYRQARGNERELVSTIRSDGSTYYGDSVKGRFTISQDNAKNTVYLQMNSLKPEDTAVYYCAADWPPGGQGTLVTVS

SEQ ID NO: 1890 - protein, 111 aa, synthetic construct
EVQLVESGGGSVQAGGSLRLSCTASGFTFDDSDMGWYRQARGNERELVSTIRSDGSTYYVDSVKGRFTISQDNAKNTVYLQMNSLKPEDTAMYYCAADWPPGGQGTLVTVS

SEQ ID NO: 1891 - protein, 111 aa, synthetic construct
EVQLVESGGGSVQAGGSLRLSCTASGFTFDDSDMGWYRQARGNERELVSTIRSDGSTYYVDSVKGRFTISQDNAKNTVYLQMNSLKPEDTAVYYCAADWPPGGQGTLVTVS

SEQ ID NO: 1892 - protein, 111 aa, synthetic construct
EVQLVESGGGSVQAGGSLRLSCTASGFTFDDSDMGWYRQARGNERELVSTISSDGGTYYGDSVKGRFSISQDNAKNTVYLQMNSLKPEDTAVYYCAADWPPGGQGTLVTVS

SEQ ID NO: 1893 - protein, 111 aa, synthetic construct
EVQLVESGGGSVQAGGSLRLSCTASGFTFDDSDMGWYRQARGNERELVSTISSDGSTYYGDSVKGRFSISQDNAKNTVYLQMNSLKPEDTAVYYCAADWPPGGQGTLVTVS

SEQ ID NO: 1894 - protein, 111 aa, synthetic construct
EVQLVESGGGSVQAGGSLRLSCTASGFTFDDSDMGWYRQARGNERELVSTISSDGSTYYVDSVKGRFSISQDNAKNTVYLQMNSLKPEDTAVYYCAADWPPGGQGTLVTVS

SEQ ID NO: 1895 - protein, 111 aa, synthetic construct
EVQLVESGGGSVQAGGSLRLSCTASGFTFDVSDMGWYRQAPGNECELVATIRSDGSTYYGDSVKGRFSISQDNAKNTVYLQMNSLKPEDTAVYYCAADWPPGGQGTLVTVS

SEQ ID NO: 1896 - protein, 111 aa, synthetic construct
EVQLVESGGGSVQAGGSLRLSCTASGFTFDVSDMGWYRQAPGNECELVSTIRSDGSTYYGDSVKGRFSISQDNAKNTVYLQMNSLKPEDTAVYYCAADWPPGGQGTLVTVS

SEQ ID NO: 1897 - protein, 111 aa, synthetic construct
EVQLVESGGGSVQAGGSLRLSCTASGFTFDVSDMGWYRQAPGNERELVATIRSDGSTYYGDSVKGRFSISQDNAKNTIYLQMNSLKPEDTAMYYCAADWPPGGQGTLVTVS

SEQ ID NO: 1898 - protein, 111 aa, synthetic construct
EVQLVESGGGSVQAGGSLRLSCTASGFTFDVSDMGWYRQAPGNERELVATIRSDGSTYYGDSVKGRFSISQDNAKNTIYLQMNSLKPEDTAVYYCAADWPPGGQGTLVTVS

SEQ ID NO: 1899 - protein, 111 aa, synthetic construct
EVQLVESGGGSVQAGGSLRLSCTASGFTFDVSDMGWYRQAPGNERELVATIRSDGSTYYGDSVKGRFSISQDNAKNTVYLQMNSLKPEDTAMYYCAADWPPGGQGTLVTVS

SEQ ID NO: 1900 - protein, 111 aa, synthetic construct
EVQLVESGGGSVQAGGSLRLSCTASGFTFDVSDMGWYRQAPGNERELVATIRSDGSTYYGDSVKGRFSISQDNAKNTVYLQMNSLKPEDTAVYYCAADWPPGGQGTLVTVS

SEQ ID NO: 1901 - protein, 111 aa, synthetic construct
EVQLVESGGGSVQAGGSLRLSCTASGFTFDVSDMGWYRQAPGNERELVATIRSDGSTYYGDSVKGRFTISQDNAKNTIYLQMNSLKPEDTAMYYCAADWPPGGQGTLVTVS

SEQ ID NO: 1902 - protein, 111 aa, synthetic construct
EVQLVESGGGSVQAGGSLRLSCTASGFTFDVSDMGWYRQAPGNERELVATIRSDGSTYYGDSVKGRFTISQDNAKNTIYLQMNSLKPEDTAVYYCAADWPPGGQGTLVTVS

SEQ ID NO: 1903 - protein, 111 aa, synthetic construct
EVQLVESGGGSVQAGGSLRLSCTASGFTFDVSDMGWYRQAPGNERELVATIRSDGSTYYGDSVKGRFTISQDNAKNTVYLQMNSLKPEDTAVYYCAADWPPGGQGTLVTVS

SEQ ID NO: 1904 - protein, 111 aa, synthetic construct
EVQLVESGGGSVQAGGSLRLSCTASGFTFDVSDMGWYRQAPGNERELVATIRSDGSTYYVDSVKGRFTISQDNAKNTVYLQMNSLKPEDTAVYYCAADWPPGGQGTLVTVS

SEQ ID NO: 1905 - protein, 111 aa, synthetic construct
EVQLVESGGGSVQAGGSLRLSCTASGFTFDVSDMGWYRQAPGNERELVSTIRSDGSTYYGDSVKGRFSISQDNAKNTIYLQMNSLKPEDTAVYYCAADWPPGGQGTLVTVS

SEQ ID NO: 1906 - protein, 111 aa, synthetic construct
EVQLVESGGGSVQAGGSLRLSCTASGFTFDVSDMGWYRQAPGNERELVSTIRSDGSTYYGDSVKGRFSISQDNAKNTVYLQMNSLKPEDTAMYYCAADWPPGGQGTLVTVS

SEQ ID NO: 1907 - protein, 111 aa, synthetic construct
EVQLVESGGGSVQAGGSLRLSCTASGFTFDVSDMGWYRQAPGNERELVSTIRSDGSTYYGDSVKGRFSISQDNAKNTVYLQMNSLKPEDTAVYYCAADWPPGGQGTLVTVS

SEQ ID NO: 1908 - protein, 111 aa, synthetic construct
EVQLVESGGGSVQAGGSLRLSCTASGFTFDVSDMGWYRQAPGNERELVSTIRSDGSTYYGDSVKGRFTISQDNAKNTVYLQMNSLKPEDTAMYYCAADWPPGGQGTLVTVS

SEQ ID NO: 1909 - protein, 111 aa, synthetic construct
EVQLVESGGGSVQAGGSLRLSCTASGFTFDVSDMGWYRQAPGNERELVSTIRSDGSTYYGDSVKGRFTISQDNAKNTVYLQMNSLKPEDTAVYYCAADWPPGGQGTLVTVS

SEQ ID NO: 1910 - protein, 111 aa, synthetic construct
EVQLVESGGGSVQAGGSLRLSCTASGFTFDVSDMGWYRQAPGNERELVSTIRSDGSTYYVDSVKGRFSISQDNAKNTVYLQMNSLKPEDTAVYYCAADWPPGGQGTLVTVS

SEQ ID NO: 1911 - protein, 111 aa, synthetic construct
EVQLVESGGGSVQAGGSLRLSCTASGFTFDVSDMGWYRQAPGNERELVSTIRSDGSTYYVDSVKGRFTISQDNAKNTIYLQMNSLKPEDTAVYYCAADWPPGGQGTLVTVS

SEQ ID NO: 1912 - protein, 111 aa, synthetic construct
EVQLVESGGGSVQAGGSLRLSCTASGFTFDVSDMGWYRQAPGNERELVSTIRSDGSTYYVDSVKGRFTISQDNAKNTVYLQMNSLKPEDTAMYYCAADWPPGGQGTLVTVS

SEQ ID NO: 1913 - protein, 111 aa, synthetic construct
EVQLVESGGGSVQAGGSLRLSCTASGFTFDVSDMGWYRQAPGNERELVSTIRSDGSTYYVDSVKGRFTISQDNAKNTVYLQMNSLKPEDTAVYYCAADWPPGGQGTLVTVS

SEQ ID NO: 1914 - protein, 111 aa, synthetic construct
EVQLVESGGGSVQAGGSLRLSCTASGFTFDVSDMGWYRQAPGNERELVSTISSDGSAYYGDSVKGRFSISQDNAKNTVYLQMNSLKPEDTAVYYCAADWPPGGQGTLVTVS

SEQ ID NO: 1915 - protein, 111 aa, synthetic construct
EVQLVESGGGSVQAGGSLRLSCTASGFTFDVSDMGWYRQAPGNERELVSTISSDGSTYYADSVKGRFSISQDNAKNTVYLQMNSLKPEDTAVYYCAADWPPGGQGTLVTVS

SEQ ID NO: 1916 - protein, 111 aa, synthetic construct
EVQLVESGGGSVQAGGSLRLSCTASGFTFDVSDMGWYRQAPGNERELVSTISSDGSTYYGDSVKGRFSISQDNAKNTVYLQMNSLKPEDTAVYYCAADWPPGGQGTLVTVS

SEQ ID NO: 1917 - protein, 111 aa, synthetic construct
EVQLVESGGGSVQAGGSLRLSCTASGFTFDVSDMGWYRQAPGNERELVSTISSDGSTYYGDSVKGRFTISQDNAKNTVYLQMNSLKPEDTAVYYCAADWPPGGQGTLVTVS

SEQ ID NO: 1918 - protein, 111 aa, synthetic construct
EVQLVESGGGSVQAGGSLRLSCTASGFTFDVSDMGWYRQAPGNERELVSTISSDGSTYYVDSVKGRFSISQDNAKNTVYLQMNSLKPEDTAVYYCAADWPPGGQGTLVTVS

SEQ ID NO: 1919 - protein, 111 aa, synthetic construct
EVQLVESGGGSVQAGGSLRLSCTASGFTFDVSDMGWYRQAPGNERELVSTISSDGSTYYVDSVKGRFTISQDNAKNTVYLQMNSLKPEDTAVYYCAADWPPGGQGTLVTVS

SEQ ID NO: 1920 - protein, 111 aa, synthetic construct
EVQLVESGGGSVQAGGSLRLSCTASGFTFDVSDMGWYRQAPGNERELVSTVSSDGSTYYGDSVKGRFSISQDNAKNTVYLQMNSLKPEDTAVYYCAADWPPGGQGTLVTVS

SEQ ID NO: 1921 - protein, 111 aa, synthetic construct
EVQLVESGGGSVQAGGSLRLSCTASGFTFDVSDMGWYRQARGNERELVATIRSDGSTYYGDSVKGRFSISQDNAKNTVYLQMNSLKPEDTAVYYCAADWPPGGQGTLVTVS

SEQ ID NO: 1922 - protein, 111 aa, synthetic construct
EVQLVESGGGSVQAGGSLRLSCTASGFTFDVSDMGWYRQARGNERELVSTIRSDGSTYYADSVKGRFTISQDNAKNTVYLQMNSLKPEDTAVYYCAADWPPGGQGTLVTVS

SEQ ID NO: 1923 - protein, 111 aa, synthetic construct
EVQLVESGGGSVQAGGSLRLSCTASGFTFDVSDMGWYRQARGNERELVSTIRSDGSTYYGDSVKGRFSISQDNAKNTVYLQMNSLKPEDTAVYYCAADWPPGGQGTLVTVS

SEQ ID NO: 1924 - protein, 111 aa, synthetic construct
EVQLVESGGGSVQAGGSLRLSCTASGFTFDVSDMGWYRQARGNERELVSTIRSDGSTYYVDSVKGRFTISQDNAKNTVYLQMNSLKPEDTAVYYCAADWPPGGQGTLVTVS

SEQ ID NO: 1925 - protein, 111 aa, synthetic construct
EVQLVESGGGSVQAGGSLRLSCTASGFTFDVSDMGWYRQARGNERELVSTISSDGSTYYADSVKGRFSISQDNAKNTVYLQMNSLKPEDTAVYYCAADWPPGGQGTLVTVS

SEQ ID NO: 1926 - protein, 111 aa, synthetic construct
EVQLVESGGGSVQAGGSLRLSCTASGFTFDVSDMGWYRQARGNERELVSTISSDGSTYYGDSVKGRFSISQDNAKNTVYLQMNSLKPEDTAVYYCAADWPPGGQGTLVTVS

SEQ ID NO: 1927 - protein, 111 aa, synthetic construct
EVQLVESGGGSVQAGGSLRLSCTASGFTFDVSDMGWYRQARGNERELVSTISSDGSTYYVDSVKGRFTISQDNAKNTVYLQMNSLKPEDTAVYYCAADWPPGGQGTLVTVS

SEQ ID NO: 1928 - protein, 111 aa, synthetic construct
EVQLVESGGGSVQAGGSLRLSRTASGFTFDDSDMGWYRQAPGNECELVATIRSDGSTYYGDSVKGRFSISQDNAKNTVYLQMNSLKPEDTAVYYCAADWPPGGQGTLVTVS

SEQ ID NO: 1929 - protein, 111 aa, synthetic construct
EVQLVESGGGSVQAGGSLRLSRTASGFTFDDSDMGWYRQAPGNECELVSTIRSDGSTYYGDSVKGRFSISQDNAKNTVYLQMNSLKPEDTAVYYCAADWPPGGQGTLVTVS

SEQ ID NO: 1930 - protein, 111 aa, synthetic construct
EVQLVESGGGSVQAGGSLRLSRTASGFTFDDSDMGWYRQAPGNECELVSTIRSDGSTYYVDSVKGRFTISQDNAKNTVYLQMNSLKPEDTAVYYCAADWPPGGQGTLVTVS

SEQ ID NO: 1931 - protein, 111 aa, synthetic construct
EVQLVESGGGSVQAGGSLRLSRTASGFTFDDSDMGWYRQAPGNERELVATIRSDGSTYYADSVKGRFSISQDNAKNTVYLQMNSLKPEDTAVYYCAADWPPGGQGTLVTVS

SEQ ID NO: 1932 - protein, 111 aa, synthetic construct
EVQLVESGGGSVQAGGSLRLSRTASGFTFDDSDMGWYRQAPGNERELVATIRSDGSTYYADSVKGRFTISQDNAKNTIYLQMNSLKPEDTAVYYCAADWPPGGQGTLVTVS

SEQ ID NO: 1933 - protein, 111 aa, synthetic construct
EVQLVESGGGSVQAGGSLRLSRTASGFTFDDSDMGWYRQAPGNERELVATIRSDGSTYYGDSVKGRFSISQDNAKNTIYLQMNSLKPEDTAMYYCAADWPPGGQGTLVTVS

SEQ ID NO: 1934 - protein, 111 aa, synthetic construct
EVQLVESGGGSVQAGGSLRLSRTASGFTFDDSDMGWYRQAPGNERELVATIRSDGSTYYGDSVKGRFSISQDNAKNTIYLQMNSLKPEDTAVYYCAADWPPGGQGTLVTVS

SEQ ID NO: 1935 - protein, 111 aa, synthetic construct
EVQLVESGGGSVQAGGSLRLSRTASGFTFDDSDMGWYRQAPGNERELVATIRSDGSTYYGDSVKGRFSISQDNAKNTVYLQMNSLKPEDTAMYYCAADWPPGGQGTLVTVS

SEQ ID NO: 1936 - protein, 111 aa, synthetic construct
EVQLVESGGGSVQAGGSLRLSRTASGFTFDDSDMGWYRQAPGNERELVATIRSDGSTYYGDSVKGRFSISQDNAKNTVYLQMNSLKPEDTAVYYCAADWPPGGPGTLVTVS

SEQ ID NO: 1937 - protein, 111 aa, synthetic construct
EVQLVESGGGSVQAGGSLRLSRTASGFTFDDSDMGWYRQAPGNERELVATIRSDGSTYYGDSVKGRFSISQDNAKNTVYLQMNSLKPEDTAVYYCAADWPPGGQGTLVTVS

SEQ ID NO: 1938 - protein, 117 aa, synthetic construct
EVQLVESGGGSVQAGGSLRLSRTASGFTFDDSDMGWYRQAPGNERELVATIRSDGSTYYGDSVKGRFSISQDNAKNTVYLQMNSLKPEDTGVYSCAAAGGYGNSSRYWGQGTSVTVS

SEQ ID NO: 1939 - protein, 111 aa, synthetic construct
EVQLVESGGGSVQAGGSLRLSRTASGFTFDDSDMGWYRQAPGNERELVATIRSDGSTYYGDSVKGRFTISQDNAKNTIYLQMNSLKPEDTAMYYCAADWPPGGQGTLVTVS

SEQ ID NO: 1940 - protein, 111 aa, synthetic construct
EVQLVESGGGSVQAGGSLRLSRTASGFTFDDSDMGWYRQAPGNERELVATIRSDGSTYYGDSVKGRFTISQDNAKNTIYLQMNSLKPEDTAVYYCAADWPPGGQGTLVTVS

SEQ ID NO: 1941 - protein, 111 aa, synthetic construct
EVQLVESGGGSVQAGGSLRLSRTASGFTFDDSDMGWYRQAPGNERELVATIRSDGSTYYGDSVKGRFTISQDNAKNTVYLQMNSLKPEDTAMYYCAADWPPGGQGTLVTVS

SEQ ID NO: 1942 - protein, 111 aa, synthetic construct
EVQLVESGGGSVQAGGSLRLSRTASGFTFDDSDMGWYRQAPGNERELVATIRSDGSTYYGDSVKGRFTISQDNAKNTVYLQMNSLKPEDTAVYYCAADWPPGGQGTLVTVS

SEQ ID NO: 1943 - protein, 111 aa, synthetic construct
EVQLVESGGGSVQAGGSLRLSRTASGFTFDDSDMGWYRQAPGNERELVATIRSDGSTYYVDSVKGRFSISQDNAKNTVYLQMNSLKPEDTAVYYCAADWPPGGQGTLVTVS

SEQ ID NO: 1944 - protein, 111 aa, synthetic construct
EVQLVESGGGSVQAGGSLRLSRTASGFTFDDSDMGWYRQAPGNERELVATIRSDGSTYYVDSVKGRFTISQDNAKNTVYLQMNSLKPEDTAMYYCAADWPPGGQGTLVTVS

SEQ ID NO: 1945 - protein, 111 aa, synthetic construct
EVQLVESGGGSVQAGGSLRLSRTASGFTFDDSDMGWYRQAPGNERELVATIRSDGSTYYVDSVKGRFTISQDNAKNTVYLQMNSLKPEDTAVYYCAADWPPGGQGTLVTVS

SEQ ID NO: 1946 - protein, 111 aa, synthetic construct
EVQLVESGGGSVQAGGSLRLSRTASGFTFDDSDMGWYRQAPGNERELVSTIRSDGSTYYGDSVKGRFSISQDNAKNTVYLQMNSLKPEDTAVYYCAADWPPGGQGTLVTVS

SEQ ID NO: 1947 - protein, 111 aa, synthetic construct
EVQLVESGGGSVQAGGSLRLSRTASGFTFDDSDMGWYRQAPGNERELVSTIRSDGSTYYGDSVKGRFTISQDNAKNTVYLQMNSLKPEDTAVYYCAADWPPGGQGTLVTVS

SEQ ID NO: 1948 - protein, 111 aa, synthetic construct
EVQLVESGGGSVQAGGSLRLSRTASGFTFDDSDMGWYRQAPGNERELVSTIRSDGSTYYVDSVKGRFSISQDNAKNTVYLQMNSLKPEDTAVYYCAADWPPGGQGTLVTVS

SEQ ID NO: 1949 - protein, 111 aa, synthetic construct
EVQLVESGGGSVQAGGSLRLSRTASGFTFDDSDMGWYRQAPGNERELVSTIRSDGSTYYVDSVKGRFTISQDNAKNTIYLQMNSLKPEDTAVYYCAADWPPGGQGTLVTVS

SEQ ID NO: 1950 - protein, 111 aa, synthetic construct
EVQLVESGGGSVQAGGSLRLSRTASGFTFDDSDMGWYRQAPGNERELVSTIRSDGSTYYVDSVKGRFTISQDNAKNTVYLQMNSLKPEDTAMYYCAADWPPGGQGTLVTVS

SEQ ID NO: 1951 - protein, 111 aa, synthetic construct
EVQLVESGGGSVQAGGSLRLSRTASGFTFDDSDMGWYRQAPGNERELVSTIRSDGSTYYVDSVKGRFTISQDNAKNTVYLQMNSLKPEDTAVYYCAADWPPGGQGTLVTVS

SEQ ID NO: 1952 - protein, 111 aa, synthetic construct
EVQLVESGGGSVQAGGSLRLSRTASGFTFDDSDMGWYRQAPGNERELVSTISSDGSTYYGDSVKGRFSISQDNAKNTVYLQMNSLKPEDTAVYYCAADWPPGGQGTLVTVS

SEQ ID NO: 1953 - protein, 111 aa, synthetic construct
EVQLVESGGGSVQAGGSLRLSRTASGFTFDDSDMGWYRQAPGNERELVSTISSDGSTYYVDSVKGRFTISQDNAKNTVYLQMNSLKPEDTAVYYCAADWPPGGQGTLVTVS

SEQ ID NO: 1954 - protein, 111 aa, synthetic construct
EVQLVESGGGSVQAGGSLRLSRTASGFTFDDSDMGWYRQARGNERELVATIRSDGSTYYGDSVKGRFSISQDNAKNTVYLQMNSLKPEDTAVYYCAADWPPGGQGTLVTVS

SEQ ID NO: 1955 - protein, 111 aa, synthetic construct
EVQLVESGGGSVQAGGSLRLSRTASGFTFDDSDMGWYRQARGNERELVATIRSDGSTYYGDSVKGRFTISQDNAKNTVYLQMNSLKPEDTAVYYCAADWPPGGQGTLVTVS

SEQ ID NO: 1956 - protein, 111 aa, synthetic construct
EVQLVESGGGSVQAGGSLRLSRTASGFTFDDSDMGWYRQARGNERELVSTIRSDGSTYYGDSVKGRFSISQDNAKNTVYLQMNSLKPEDTAVYYCAADWPPGGQGTLVTVS

SEQ ID NO: 1957 - protein, 111 aa, synthetic construct
EVQLVESGGGSVQAGGSLRLSRTASGFTFDDSDMGWYRQARGNERELVSTIRSDGSTYYVDSVKGRFTISQDNAKNTVYLQMNSLKPEDTAVYYCAADWPPGGQGTLVTVS

SEQ ID NO: 1958 - protein, 111 aa, synthetic construct
EVQLVESGGGSVQAGGSLRLSRTASGFTFDDSDMGWYRQARGNERELVSTISSDGSTYYGDSVKGRFSISQDNAKNTVYLQMNSLKPEDTAVYYCAADWPPGGQGTLVTVS

SEQ ID NO: 1959 - protein, 111 aa, synthetic construct
EVQLVESGGGSVQAGGSLRLSRTASGFTFDVSDMGWYRQAPGNECELVSTIRSDGSTYYVDSVKGRFTISQDNAKNTVYLQMNSLKPEDTAVYYCAADWPPGGQGTLVTVS

SEQ ID NO: 1960 - protein, 111 aa, synthetic construct
EVQLVESGGGSVQAGGSLRLSRTASGFTFDVSDMGWYRQAPGNERELVATIRSDGSTYYGDSVKGRFSISQDNAKNTVYLQMNSLKPEDTAVYYCAADWPPGGQGTLVTVS

SEQ ID NO: 1961 - protein, 111 aa, synthetic construct
EVQLVESGGGSVQAGGSLRLSRTASGFTFDVSDMGWYRQAPGNERELVATIRSDGSTYYGDSVKGRFTISQDNAKNTVYLQMNSLKPEDTAVYYCAADWPPGGQGTLVTVS

SEQ ID NO: 1962 - protein, 111 aa, synthetic construct
EVQLVESGGGSVQAGGSLRLSRTASGFTFDVSDMGWYRQAPGNERELVATIRSDGSTYYVDSVKGRFTISQDNAKNTVYLQMNSLKPEDTAVYYCAADWPPGGQGTLVTVS

SEQ ID NO: 1963 - protein, 111 aa, synthetic construct
EVQLVESGGGSVQAGGSLRLSRTASGFTFDVSDMGWYRQAPGNERELVSTIRSDGSTYYGDSVKGRFSISQDNAKNTVYLQMNSLKPEDTAVYYCAADWPPGGQGTLVTVS

SEQ ID NO: 1964 - protein, 111 aa, synthetic construct
EVQLVESGGGSVQAGGSLRLSRTASGFTFDVSDMGWYRQAPGNERELVSTIRSDGSTYYVDSVKGRFSISQDNAKNTVYLQMNSLKPEDTAVYYCAADWPPGGQGTLVTVS

SEQ ID NO: 1965 - protein, 111 aa, synthetic construct
EVQLVESGGGSVQAGGSLRLSRTASGFTFDVSDMGWYRQAPGNERELVSTIRSDGSTYYVDSVKGRFTISQDNAKNTIYLQMNSLKPEDTAVYYCAADWPPGGQGTLVTVS

SEQ ID NO: 1966 - protein, 111 aa, synthetic construct
EVQLVESGGGSVQAGGSLRLSRTASGFTFDVSDMGWYRQAPGNERELVSTIRSDGSTYYVDSVKGRFTISQDNAKNTVYLQMNSLKPEDTAVYYCAADWPPGGQGTLVTVS

SEQ ID NO: 1967 - protein, 111 aa, synthetic construct
EVQLVESGGGSVQAGGSLRLSRTASGFTFDVSDMGWYRQAPGNERELVSTISSDGSTYYVDSVKGRFTISQDNAKNTVYLQMNSLKPEDTAVYYCAADWPPGGQGTLVTVS

SEQ ID NO: 1968 - protein, 111 aa, synthetic construct
EVQLVESGGGSVQAGGSLRLSRTASGFTFDVSDMGWYRQARGNERELVSTIRSDGSTYYGDSVKGRFSISQDNAKNTVYLQMNSLKPEDTAVYYCAADWPPGGQGTLVTVS

SEQ ID NO: 1969 - protein, 111 aa, synthetic construct
EVQVVESGGGSVEAGGSLRLSCTASGFTFDDSDMGWYRQAPGNERELVATIRSDGSTYYGDSVKGRFSISQDNAKNTIYLQMNSLKPEDTAVYYCAADWPPGGQGTLVTVS

SEQ ID NO: 1970 - protein, 111 aa, synthetic construct
EVQVVESGGGSVEAGGSLRLSCTASGFTFDDSDMGWYRQAPGNERELVATIRSDGSTYYGDSVKGRFSISQDNAKNTVYLQMNSLKPEDTAMYYCAADWPPGGQGTLVTVS

SEQ ID NO: 1971 - protein, 111 aa, synthetic construct
EVQVVESGGGSVEAGGSLRLSCTASGFTFDDSDMGWYRQAPGNERELVATIRSDGSTYYGDSVKGRFSISQDNAKNTVYLQMNSLKPEDTAVYYCAADWPPGGQGTLVTVS

SEQ ID NO: 1972 - protein, 111 aa, synthetic construct
EVQVVESGGGSVEAGGSLRLSCTASGFTFDDSDMGWYRQAPGNERELVATIRSDGSTYYGDSVKGRFTISQDNAKNTVYLQMNSLKPEDTAVYYCAADWPPGGQGTLVTVS

SEQ ID NO: 1973 - protein, 111 aa, synthetic construct
EVQVVESGGGSVEAGGSLRLSCTASGFTFDDSDMGWYRQAPGNERELVATIRSDGSTYYVDSVKGRFTISQDNAKNTVYLQMNSLKPEDTAVYYCAADWPPGGQGTLVTVS

SEQ ID NO: 1974 - protein, 111 aa, synthetic construct
EVQVVESGGGSVEAGGSLRLSCTASGFTFDDSDMGWYRQAPGNERELVSTIRSDGSTYYADSVKGRFTISQDNAKNTVYLQMNSLKPEDTAVYYCAADWPPGGQGTLVTVS

SEQ ID NO: 1975 - protein, 111 aa, synthetic construct
EVQVVESGGGSVEAGGSLRLSCTASGFTFDDSDMGWYRQAPGNERELVSTIRSDGSTYYGDSVKGRFSISQDNAKNTVYLQMNSLKPEDTAVYYCAADWPPGGQGTLVTVS

SEQ ID NO: 1976 - protein, 111 aa, synthetic construct
EVQVVESGGGSVEAGGSLRLSCTASGFTFDDSDMGWYRQAPGNERELVSTIRSDGSTYYGDSVKGRFTISQDNAKNTVYLQMNSLKPEDTAVYYCAADWPPGGQGTLVTVS

SEQ ID NO: 1977 - protein, 111 aa, synthetic construct
EVQVVESGGGSVEAGGSLRLSCTASGFTFDDSDMGWYRQAPGNERELVSTIRSDGSTYYVDSVKGRFSISQDNAKNTVYLQMNSLKPEDTAVYYCAADWPPGGQGTLVTVS

SEQ ID NO: 1978 - protein, 111 aa, synthetic construct
EVQVVESGGGSVEAGGSLRLSCTASGFTFDDSDMGWYRQAPGNERELVSTIRSDGSTYYVDSVKGRFTISQDNAKNTIYLQMNSLKPEDTAVYYCAADWPPGGQGTLVTVS

SEQ ID NO: 1979 - protein, 111 aa, synthetic construct
EVQVVESGGGSVEAGGSLRLSCTASGFTFDDSDMGWYRQAPGNERELVSTIRSDGSTYYVDSVKGRFTISQDNAKNTVYLQMNSLKPEDTAMYYCAADWPPGGQGTLVTVS

SEQ ID NO: 1980 - protein, 111 aa, synthetic construct
EVQVVESGGGSVEAGGSLRLSCTASGFTFDDSDMGWYRQAPGNERELVSTIRSDGSTYYVDSVKGRFTISQDNAKNTVYLQMNSLKPEDTAVYYCAADWPPGGPGTLVTVS

SEQ ID NO: 1981 - protein, 111 aa, synthetic construct
EVQVVESGGGSVEAGGSLRLSCTASGFTFDDSDMGWYRQAPGNERELVSTIRSDGSTYYVDSVKGRFTISQDNAKNTVYLQMNSLKPEDTAVYYCAADWPPGGQGTLVTVS

SEQ ID NO: 1982 - protein, 111 aa, synthetic construct
EVQVVESGGGSVEAGGSLRLSCTASGFTFDDSDMGWYRQAPGNERELVSTISSDGSTYYVDSVKGRFTISQDNAKNTVYLQMNSLKPEDTAVYYCAADWPPGGQGTLVTVS

SEQ ID NO: 1983 - protein, 111 aa, synthetic construct
EVQVVESGGGSVEAGGSLRLSCTASGFTFDDSDMGWYRQARGNERELVATIRSDGSTYYGDSVKGRFSISQDNAKNTVYLQMNSLKPEDTAVYYCAADWPPGGQGTLVTVS

SEQ ID NO: 1984 - protein, 111 aa, synthetic construct
EVQVVESGGGSVEAGGSLRLSCTASGFTFDDSDMGWYRQARGNERELVSTIRSDGSTYYGDSVKGRFSISQDNAKNTVYLQMNSLKPEDTAVYYCAADWPPGGQGTLVTVS

SEQ ID NO: 1985 - protein, 111 aa, synthetic construct
EVQVVESGGGSVEAGGSLRLSCTASGFTFDDSDMGWYRQARGNERELVSTIRSDGSTYYVDSVKGRFTISQDNAKNTVYLQMNSLKPEDTAVYYCAADWPPGGQGTLVTVS

SEQ ID NO: 1986 - protein, 111 aa, synthetic construct
EVQVVESGGGSVEAGGSLRLSCTASGFTFDVSDMGWYRQAPGNERELVATIRSDGSTYYGDSVKGRFSISQDNAKNTVYLQMNSLKPEDTAVYYCAADWPPGGQGTLVTVS

SEQ ID NO: 1987 - protein, 111 aa, synthetic construct
EVQVVESGGGSVEAGGSLRLSCTASGFTFDVSDMGWYRQAPGNERELVATIRSDGSTYYGDSVKGRFTISQDNAKNTVYLQMNSLKPEDTAVYYCAADWPPGGQGTLVTVS

SEQ ID NO: 1988 - protein, 111 aa, synthetic construct
EVQVVESGGGSVEAGGSLRLSCTASGFTFDVSDMGWYRQAPGNERELVSTIRSDGSTYYGDSVKGRFSISQDNAKNTVYLQMNSLKPEDTAVYYCAADWPPGGQGTLVTVS

SEQ ID NO: 1989 - protein, 111 aa, synthetic construct
EVQVVESGGGSVEAGGSLRLSCTASGFTFDVSDMGWYRQAPGNERELVSTIRSDGSTYYGDSVKGRFTISQDNAKNTVYLQMNSLKPEDTAVYYCAADWPPGGQGTLVTVS

SEQ ID NO: 1990 - protein, 111 aa, synthetic construct
EVQVVESGGGSVEAGGSLRLSCTASGFTFDVSDMGWYRQAPGNERELVSTIRSDGSTYYVDSVKGRFTISQDNAKNTVYLQMNSLKPEDTAVYYCAADWPPGGQGTLVTVS

SEQ ID NO: 1991 - protein, 111 aa, synthetic construct
EVQVVESGGGSVEAGGSLRLSCTASGFTFDVSDMGWYRQAPGNERELVSTISSDGSTYYGDSVKGRFSISQDNAKNTVYLQMNSLKPEDTAVYYCAADWPPGGQGTLVTVS

SEQ ID NO: 1992 - protein, 111 aa, synthetic construct
EVQVVESGGGSVEAGGSLRLSCTASGFTFDVSDMGWYRQARGNERELVSTISSDGSTYYGDSVKGRFSISQDNAKNTVYLQMNSLKPEDTAVYYCAADWPPGGQGTLVTVS

SEQ ID NO: 1993 - protein, 111 aa, synthetic construct
EVQVVESGGGSVEAGGSLRLSRTASGFTFDDSDMGWYRQAPGNERELVATIRSDGSTYYGDSVKGRFSISQDNAKNTVYLQMNSLKPEDTAVYYCAADWPPGGQGTLVTVS

SEQ ID NO: 1994 - protein, 111 aa, synthetic construct
EVQVVESGGGSVEAGGSLRLSRTASGFTFDDSDMGWYRQAPGNERELVSTIRSDGSTYYVDSVKGRFTISQDNAKNTVYLQMNSLKPEDTAVYYCAADWPPGGQGTLVTVS

SEQ ID NO: 1995 - protein, 111 aa, synthetic construct
EVQVVESGGGSVQAGGSLRLSCTASGFTFDDSDMGWYRQAPGNECELVSTIRSDGSTYYVDSVKGRFTISQDNAKNTVYLQMNSLKPEDTAVYYCAADWPPGGQGTLVTVS

SEQ ID NO: 1996 - protein, 111 aa, synthetic construct
EVQVVESGGGSVQAGGSLRLSCTASGFTFDDSDMGWYRQAPGNECELVSTVSSDGSTYYGDSVKGRFSISQDNAKNTVYLQMNSLKPEDTAVYYCAADWPPGGQGTLVTVS

SEQ ID NO: 1997 - protein, 111 aa, synthetic construct
EVQVVESGGGSVQAGGSLRLSCTASGFTFDDSDMGWYRQAPGNERELVATIRSDGSTYYADSVKGRFTISQDNAKNTIYLQMNSLKPEDTAVYYCAADWPPGGQGTLVTVS

SEQ ID NO: 1998 - protein, 111 aa, synthetic construct
EVQVVESGGGSVQAGGSLRLSCTASGFTFDDSDMGWYRQAPGNERELVATIRSDGSTYYGDSVKGRFSISQDNAKNTIYLQMNSLKPEDTAVYYCAADWPPGGQGTLVTVS

SEQ ID NO: 1999 - protein, 111 aa, synthetic construct
EVQVVESGGGSVQAGGSLRLSCTASGFTFDDSDMGWYRQAPGNERELVATIRSDGSTYYGDSVKGRFSISQDNAKTTVYLQMNSLKPEDTAVYYCAADWPPGGQGTLVTVS

SEQ ID NO: 2000 - protein, 111 aa, synthetic construct
EVQVVESGGGSVQAGGSLRLSCTASGFTFDDSDMGWYRQAPGNERELVATIRSDGSTYYGDSVKGRFTISQDNAKNTIYLQMNSLKPEDTAMYYCAADWPPGGQGTLVTVS

SEQ ID NO: 2001 - protein, 111 aa, synthetic construct
EVQVVESGGGSVQAGGSLRLSCTASGFTFDDSDMGWYRQAPGNERELVATIRSDGSTYYGDSVKGRFTISQDNAKNTIYLQMNSLKPEDTAVYYCAADWPPGGQGTLVTVS

SEQ ID NO: 2002 - protein, 111 aa, synthetic construct
EVQVVESGGGSVQAGGSLRLSCTASGFTFDDSDMGWYRQAPGNERELVATIRSDGSTYYGDSVKGRFTISQDNAKNTVYLQMNSLKPEDTAVYYCAADWPPGGQGTLVTVS

SEQ ID NO: 2003 - protein, 111 aa, synthetic construct
EVQVVESGGGSVQAGGSLRLSCTASGFTFDDSDMGWYRQAPGNERELVATIRSDGSTYYVDSVKGRFTISQDNAKNTVYLQMNSLKPEDTAVYYCAADWPPGGQGTLVTVS

SEQ ID NO: 2004 - protein, 111 aa, synthetic construct
EVQVVESGGGSVQAGGSLRLSCTASGFTFDDSDMGWYRQAPGNERELVSTIFSDGSTYYGDSVKGRFSISQDNAKNTVYLQMNSLKPEDTAVYYCAADWPPGGQGTLVTVS

SEQ ID NO: 2005 - protein, 111 aa, synthetic construct
EVQVVESGGGSVQAGGSLRLSCTASGFTFDDSDMGWYRQAPGNERELVSTIRSDGSTYYADSVKGRFTISQDNAKNTVYLQMNSLKPEDTAVYYCAADWPPGGQGTLVTVS

SEQ ID NO: 2006 - protein, 111 aa, synthetic construct
EVQVVESGGGSVQAGGSLRLSCTASGFTFDDSDMGWYRQAPGNERELVSTIRSDGSTYYGDSVKGRFSISQDNAKNTVYLQMNSLKPEDTAVYYCAADWPPGGQGTLVTVS

SEQ ID NO: 2007 - protein, 111 aa, synthetic construct
EVQVVESGGGSVQAGGSLRLSCTASGFTFDDSDMGWYRQAPGNERELVSTIRSDGSTYYGDSVKGRFTISQDNAKNTVYLQMNSLKPEDTAVYYCAADWPPGGQGTLVTVS

SEQ ID NO: 2008 - protein, 111 aa, synthetic construct
EVQVVESGGGSVQAGGSLRLSCTASGFTFDDSDMGWYRQAPGNERELVSTIRSDGSTYYVDSVKGRFSISQDNAKNTVYLQMNSLKPEDTAVYYCAADWPPGGQGTLVTVS

SEQ ID NO: 2009 - protein, 111 aa, synthetic construct
EVQVVESGGGSVQAGGSLRLSCTASGFTFDDSDMGWYRQAPGNERELVSTIRSDGSTYYVDSVKGRFTISQDNAKNTIYLQMNSLKPEDTAVYYCAADWPPGGQGTLVTVS

SEQ ID NO: 2010 - protein, 111 aa, synthetic construct
EVQVVESGGGSVQAGGSLRLSCTASGFTFDDSDMGWYRQAPGNERELVSTIRSDGSTYYVDSVKGRFTISQDNAKNTVYLQMNSLKPEDTAMYYCAADWPPGGQGTLVTVS

SEQ ID NO: 2011 - protein, 111 aa, synthetic construct
EVQVVESGGGSVQAGGSLRLSCTASGFTFDDSDMGWYRQAPGNERELVSTIRSDGSTYYVDSVKGRFTISQDNAKNTVYLQMNSLKPEDTAVYYCAADWPPGGQGTLVTVS

SEQ ID NO: 2012 - protein, 111 aa, synthetic construct
EVQVVESGGGSVQAGGSLRLSCTASGFTFDDSDMGWYRQAPGNERELVSTISSDGSAYYGDSVKGRFSISQDNAKNTVYLQMNSLKPEDTAVYYCAADWPPGGQGTLVTVS

SEQ ID NO: 2013 - protein, 111 aa, synthetic construct
EVQVVESGGGSVQAGGSLRLSCTASGFTFDDSDMGWYRQAPGNERELVSTISSDGSTYYGDSVKGRFSISQDNAKNTVYLQMNSLKPEDTAVYYCAADWPPGGQGTLVTVS

SEQ ID NO: 2014 - protein, 111 aa, synthetic construct
EVQVVESGGGSVQAGGSLRLSCTASGFTFDDSDMGWYRQAPGNERELVSTISSDGSTYYVDSVKGRFTISQDNAKNTVYLQMNSLKPEDTAVYYCAADWPPGGQGTLVTVS

SEQ ID NO: 2015 - protein, 111 aa, synthetic construct
EVQVVESGGGSVQAGGSLRLSCTASGFTFDDSDMGWYRQARGNERELVATIRSDGSTYYADSVKGRFTISQDNAKNTVYLQMNSLKPEDTAVYYCAADWPPGGQGTLVTVS

SEQ ID NO: 2016 - protein, 111 aa, synthetic construct
EVQVVESGGGSVQAGGSLRLSCTASGFTFDDSDMGWYRQARGNERELVATIRSDGSTYYGDSVKGRFSISQDNAKNTVYLQMNSLKPEDTAVYYCAADWPPGGQGTLVTVS

SEQ ID NO: 2017 - protein, 111 aa, synthetic construct
EVQVVESGGGSVQAGGSLRLSCTASGFTFDDSDMGWYRQARGNERELVATIRSDGSTYYGDSVKGRFTISQDNAKNTVYLQMNSLKPEDTAVYYCAADWPPGGQGTLVTVS

SEQ ID NO: 2018 - protein, 111 aa, synthetic construct
EVQVVESGGGSVQAGGSLRLSCTASGFTFDDSDMGWYRQARGNERELVSTIRSDGSTYYADSVKGRFTISQDNAKNTVYLQMNSLKPEDTAVYYCAADWPPGGQGTLVTVS

SEQ ID NO: 2019 - protein, 111 aa, synthetic construct
EVQVVESGGGSVQAGGSLRLSCTASGFTFDDSDMGWYRQARGNERELVSTIRSDGSTYYGDSVKGRFSISQDNAKNTVYLQMNSLKPEDTAVYYCAADWPPGGQGTLVTVS

SEQ ID NO: 2020 - protein, 111 aa, synthetic construct
EVQVVESGGGSVQAGGSLRLSCTASGFTFDDSDMGWYRQARGNERELVSTIRSDGSTYYGDSVKGRFTISQDNAKNTVYLQMNSLKPEDTAVYYCAADWPPGGQGTLVTVS

SEQ ID NO: 2021 - protein, 111 aa, synthetic construct
EVQVVESGGGSVQAGGSLRLSCTASGFTFDDSDMGWYRQARGNERELVSTIRSDGSTYYVDSVKGRFTISQDNAKNTVYLQMNSLKPEDTAVYYCAADWPPGGQGTLVTVS

SEQ ID NO: 2022 - protein, 111 aa, synthetic construct
EVQVVESGGGSVQAGGSLRLSCTASGFTFDDSDMGWYRQARGNERELVSTISSDGSTYYGDSVKGRFSISQDNAKNTVYLQMNSLKPEDTAVYYCAADWPPGGQGTLVTVS

SEQ ID NO: 2023 - protein, 111 aa, synthetic construct
EVQVVESGGGSVQAGGSLRLSCTASGFTFDVSDMGWYRQAPGNERELVATIRSDGSTYYGDSVKGRFSISQDNAKNTVYLQMNSLKPEDTAVYYCAADWPPGGQGTLVTVS

SEQ ID NO: 2024 - protein, 111 aa, synthetic construct
EVQVVESGGGSVQAGGSLRLSCTASGFTFDVSDMGWYRQAPGNERELVATIRSDGSTYYGDSVKGRFTISQDNAKNTIYLQMNSLKPEDTAVYYCAADWPPGGQGTLVTVS

SEQ ID NO: 2025 - protein, 111 aa, synthetic construct
EVQVVESGGGSVQAGGSLRLSCTASGFTFDVSDMGWYRQAPGNERELVATIRSDGSTYYGDSVKGRFTISQDNAKNTVYLQMNSLKPEDTAVYYCAADWPPGGQGTLVTVS

SEQ ID NO: 2026 - protein, 111 aa, synthetic construct
EVQVVESGGGSVQAGGSLRLSCTASGFTFDVSDMGWYRQAPGNERELVATIRSDGSTYYVDSVKGRFTISQDNAKNTVYLQMNSLKPEDTAVYYCAADWPPGGQGTLVTVS

SEQ ID NO: 2027 - protein, 111 aa, synthetic construct
EVQVVESGGGSVQAGGSLRLSCTASGFTFDVSDMGWYRQAPGNERELVSTIRSDGSTYYGDSVKGRFSISQDNAKNTVYLQMNSLKPEDTAVYYCAADWPPGGQGTLVTVS

SEQ ID NO: 2028 - protein, 111 aa, synthetic construct
EVQVVESGGGSVQAGGSLRLSCTASGFTFDVSDMGWYRQAPGNERELVSTIRSDGSTYYGDSVKGRFTISQDNAKNTIYLQMNSLKPEDTAMYYCAADWPPGGQGTLVTVS

SEQ ID NO: 2029 - protein, 111 aa, synthetic construct
EVQVVESGGGSVQAGGSLRLSCTASGFTFDVSDMGWYRQAPGNERELVSTIRSDGSTYYGDSVKGRFTISQDNAKNTVYLQMNSLKPEDTAVYYCAADWPPGGQGTLVTVS

SEQ ID NO: 2030 - protein, 111 aa, synthetic construct
EVQVVESGGGSVQAGGSLRLSCTASGFTFDVSDMGWYRQAPGNERELVSTIRSDGSTYYVDSVKGRFSISQDNAKNTVYLQMNSLKPEDTAVYYCAADWPPGGQGTLVTVS

SEQ ID NO: 2031 - protein, 111 aa, synthetic construct
EVQVVESGGGSVQAGGSLRLSCTASGFTFDVSDMGWYRQAPGNERELVSTISSDGSAYYGDSVKGRFSISQDNAKNTVYLQMNSLKPEDTAVYYCAADWPPGGQGTLVTVS

SEQ ID NO: 2032 - protein, 111 aa, synthetic construct
EVQVVESGGGSVQAGGSLRLSCTASGFTFDVSDMGWYRQAPGNERELVSTISSDGSTYYGDSVKGRFTISQDNAKNTVYLQMNSLKPEDTAVYYCAADWPPGGQGTLVTVS

SEQ ID NO: 2033 - protein, 111 aa, synthetic construct
EVQVVESGGGSVQAGGSLRLSCTASGFTFDVSDMGWYRQAPGNERELVSTISSDGSTYYVDSVKGRFTISQDNAKNTVYLQMNSLKPEDTAVYYCAADWPPGGQGTLVTVS

SEQ ID NO: 2034 - protein, 111 aa, synthetic construct
EVQVVESGGGSVQAGGSLRLSCTASGFTFDVSDMGWYRQARGNERELVSTIRSDGSTYYVDSVKGRFTISQDNAKNTVYLQMNSLKPEDTAVYYCAADWPPGGQGTLVTVS

SEQ ID NO: 2035 - protein, 111 aa, synthetic construct
EVQVVESGGGSVQAGGSLRLSRTASGFTFDDSDMGWYRQAPGNERELVATIRSDGSTYYGDSVKGRFSISQDNAKNTIYLQMNSLKPEDTAVYYCAADWPPGGQGTLVTVS

SEQ ID NO: 2036 - protein, 111 aa, synthetic construct
EVQVVESGGGSVQAGGSLRLSRTASGFTFDDSDMGWYRQAPGNERELVATIRSDGSTYYGDSVKGRFSISQDNAKNTVYLQMNSLKPEDTAMYYCAADWPPGGQGTLVTVS

SEQ ID NO: 2037 - protein, 111 aa, synthetic construct
EVQVVESGGGSVQAGGSLRLSRTASGFTFDDSDMGWYRQAPGNERELVATIRSDGSTYYGDSVKGRFSISQDNAKNTVYLQMNSLKPEDTAVYYCAADWPPGGQGTLVTVS

SEQ ID NO: 2038 - protein, 111 aa, synthetic construct
EVQVVESGGGSVQAGGSLRLSRTASGFTFDDSDMGWYRQAPGNERELVATIRSDGSTYYGDSVKGRFTISQDNAKNTIYLQMNSLKPEDTAVYYCAADWPPGGQGTLVTVS

SEQ ID NO: 2039 - protein, 111 aa, synthetic construct
EVQVVESGGGSVQAGGSLRLSRTASGFTFDDSDMGWYRQAPGNERELVATIRSDGSTYYGDSVKGRFTISQDNAKNTVYLQMNSLKPEDTAVYYCAADWPPGGQGTLVTVS

SEQ ID NO: 2040 - protein, 111 aa, synthetic construct
EVQVVESGGGSVQAGGSLRLSRTASGFTFDDSDMGWYRQAPGNERELVSTIRSDGSTYYGDSVKGRFSISQDNAKNTVYLQMNSLKPEDTAVYYCAADWPPGGQGTLVTVS

SEQ ID NO: 2041 - protein, 111 aa, synthetic construct
EVQVVESGGGSVQAGGSLRLSRTASGFTFDDSDMGWYRQAPGNERELVSTIRSDGSTYYGDSVKGRFTISQDNAKNTVYLQMNSLKPEDTAVYYCAADWPPGGQGTLVTVS

SEQ ID NO: 2042 - protein, 111 aa, synthetic construct
EVQVVESGGGSVQAGGSLRLSRTASGFTFDDSDMGWYRQAPGNERELVSTIRSDGSTYYVDSVKGRFSISQDNAKNTVYLQMNSLKPEDTAVYYCAADWPPGGQGTLVTVS

SEQ ID NO: 2043 - protein, 111 aa, synthetic construct
EVQVVESGGGSVQAGGSLRLSRTASGFTFDDSDMGWYRQAPGNERELVSTIRSDGSTYYVDSVKGRFTISQDNAKNTVYLQMNSLKPEDTAMYYCAADWPPGGQGTLVTVS

SEQ ID NO: 2044 - protein, 111 aa, synthetic construct
EVQVVESGGGSVQAGGSLRLSRTASGFTFDDSDMGWYRQAPGNERELVSTIRSDGSTYYVDSVKGRFTISQDNAKNTVYLQMNSLKPEDTAVYYCAADWPPGGQGTLVTVS

SEQ ID NO: 2045 - protein, 111 aa, synthetic construct
EVQVVESGGGSVQAGGSLRLSRTASGFTFDDSDMGWYRQAPGNERELVSTISSDGSTYYGDSVKGRFSISQDNAKNTVYLQMNSLKPEDTAVYYCAADWPPGGQGTLVTVS

SEQ ID NO: 2046 - protein, 111 aa, synthetic construct
EVQVVESGGGSVQAGGSLRLSRTASGFTFDDSDMGWYRQAPGNERELVSTISSDGSTYYVDSVKGRFTISQDNAKNTVYLQMNSLKPEDTAVYYCAADWPPGGQGTLVTVS

SEQ ID NO: 2047 - protein, 111 aa, synthetic construct
EVQVVESGGGSVQAGGSLRLSRTASGFTFDDSDMGWYRQARGNERELVSTIRSDGSTYYGDSVKGRFSISQDNAKNTVYLQMNSLKPEDTAVYYCAADWPPGGQGTLVTVS

SEQ ID NO: 2048 - protein, 111 aa, synthetic construct
EVQVVESGGGSVQAGGSLRLSRTASGFTFDDSDMGWYRQARGNERELVSTIRSDGSTYYVDSVKGRFTISQDNAKNTVYLQMNSLKPEDTAVYYCAADWPPGGQGTLVTVS

SEQ ID NO: 2049 - protein, 111 aa, synthetic construct
EVQVVESGGGSVQAGGSLRLSRTASGFTFDVSDMGWYRQAPGNERELVATIRSDGSTYYGDSVKGRFSISQDNAKNTVYLQMNSLKPEDTAVYYCAADWPPGGQGTLVTVS

SEQ ID NO: 2050 - protein, 111 aa, synthetic construct
EVQVVESGGGSVQAGGSLRLSRTASGFTFDVSDMGWYRQAPGNERELVATIRSDGSTYYGDSVKGRFTISQDNAKNTVYLQMNSLKPEDTAVYYCAADWPPGGQGTLVTVS

SEQ ID NO: 2051 - protein, 111 aa, synthetic construct
EVQVVESGGGSVQAGGSLRLSRTASGFTFDVSDMGWYRQAPGNERELVSTIRSDGSTYYGDSVKGRFSISQDNAKNTVYLQMNSLKPEDTAVYYCAADWPPGGQGTLVTVS

SEQ ID NO: 2052 - protein, 111 aa, synthetic construct
EVQVVESGGGSVQAGGSLRLSRTASGFTFDVSDMGWYRQAPGNERELVSTIRSDGSTYYVDSVKGRFTISQDNAKNTVYLQMNSLKPEDTAVYYCAADWPPGGQGTLVTVS

SEQ ID NO: 2053 - protein, 111 aa, synthetic construct
EVQVVESGGGSVQAGGSLRLSRTASGFTFDVSDMGWYRQAPGNERELVSTISSDGSTYYGDSVKGRFSISQDNAKNTVYLQMNSLKPEDTAVYYCAADWPPGGQGTLVTVS

SEQ ID NO: 2054 - protein, 111 aa, synthetic construct
EVQVVESGGGSVQAGGSLRLSRTASGFTFDVSDMGWYRQAPGNERELVSTISSDGSTYYVDSVKGRFTISQDNAKNTVYLQMNSLKPEDTAVYYCAADWPPGGQGTLVTVS

SEQ ID NO: 2055 - protein, 110 aa, synthetic construct
VQLVESGGGSVQAGGSLRLSCTASGFTFDDSDMGWYRQAPGNERELVSTIRSDGSTYYVDSVKGRFTISQDNAKNTVYLQMNSLKPEDTAVYYCAADWPPGGQGTLVTVS

SEQ ID NO: 2056 - protein, 110 aa, synthetic construct
VQLVESGGGSVQAGGSLRLSRTASGFTFDDSDMGWYRQAPGNERELVATIRSDGSTYYGDSVKGRFSISQDNAKNTVYLQMNSLKPEDTAVYYCAADWPPGGQGTLVTVS

SEQ ID NO: 2057 - protein, 8 aa, synthetic construct
GFTFDVSD

SEQ ID NO: 2058 - protein, 7 aa, synthetic construct
IRSDGST

SEQ ID NO: 2059 - protein, 8 aa, synthetic construct
TIRSDGST

SEQ ID NO: 2060 - protein, 7 aa, synthetic construct
ISSDGSA

SEQ ID NO: 2061 - protein, 7 aa, synthetic construct
VSSDGST

SEQ ID NO: 2062 - protein, 7 aa, synthetic construct
IFSDGST

SEQ ID NO: 2063 - protein, 7 aa, synthetic construct
ISSDGGT

SEQ ID NO: 2064 - protein, 6 aa, synthetic construct
AADWPP

SEQ ID NO: 2065 - protein, 8 aa, synthetic construct
GSMVSINA

SEQ ID NO: 2066 - protein, 8 aa, synthetic construct
CSMFSINA

SEQ ID NO: 2067 - protein, 8 aa, synthetic construct
GAMFSINA

SEQ ID NO: 2068 - protein, 8 aa, synthetic construct
GFMFSINA

SEQ ID NO: 2069 - protein, 8 aa, synthetic construct
GSIFSINA

SEQ ID NO: 2070 - protein, 8 aa, synthetic construct
GSLFSINA

SEQ ID NO: 2071 - protein, 8 aa, synthetic construct
GSMCSINA

SEQ ID NO: 2072 - protein, 8 aa, synthetic construct
GSMFFINA

SEQ ID NO: 2073 - protein, 8 aa, synthetic construct
GSMFPINA

SEQ ID NO: 2074 - protein, 8 aa, synthetic construct
GSMFSIDA

SEQ ID NO: 2075 - protein, 8 aa, synthetic construct
GSMFSINV

SEQ ID NO: 2076 - protein, 8 aa, synthetic construct
GSMFSIYA

SEQ ID NO: 2077 - protein, 8 aa, synthetic construct
GSMFSLNA

SEQ ID NO: 2078 - protein, 8 aa, synthetic construct
GSMFSMNA

SEQ ID NO: 2079 - protein, 8 aa, synthetic construct
GSMFSTNA

SEQ ID NO: 2080 - protein, 8 aa, synthetic construct
GSMFSVNA

SEQ ID NO: 2081 - protein, 8 aa, synthetic construct
GSMLSINA

SEQ ID NO: 2082 - protein, 8 aa, synthetic construct
GSMSSINA

SEQ ID NO: 2083 - protein, 8 aa, synthetic construct
GSRFSINA

SEQ ID NO: 2084 - protein, 8 aa, synthetic construct
SSMFSINA

SEQ ID NO: 2085 - protein, 8 aa, synthetic construct
MTSGGSTI

SEQ ID NO: 2086 - protein, 7 aa, synthetic construct
MASGGST

SEQ ID NO: 2087 - protein, 7 aa, synthetic construct
MISGGST

SEQ ID NO: 2088 - protein, 7 aa, synthetic construct
MTFGGST

SEQ ID NO: 2089 - protein, 7 aa, synthetic construct
MTPGGST

SEQ ID NO: 2090 - protein, 7 aa, synthetic construct
MTSGGGT

SEQ ID NO: 2091 - protein, 7 aa, synthetic construct
MTSGGIT

SEQ ID NO: 2092 - protein, 7 aa, synthetic construct
MTSGGRT

SEQ ID NO: 2093 - protein, 8 aa, synthetic construct
MTSGGSAI

SEQ ID NO: 2094 - protein, 8 aa, synthetic construct
MTSGGSII

SEQ ID NO: 2095 - protein, 8 aa, synthetic construct
MTSGGSTT

SEQ ID NO: 2096 - protein, 7 aa, synthetic construct
MTSGVST

SEQ ID NO: 2097 - protein, 8 aa, synthetic construct
VMTSGGST

SEQ ID NO: 2098 - protein, 11 aa, synthetic construct
IYCRYDGEFAY

SEQ ID NO: 2099 - protein, 10 aa, synthetic construct
DGGWSLAMDY

SEQ ID NO: 2100 - protein, 10 aa, synthetic construct
HGGWSLAMDY

SEQ ID NO: 2101 - protein, 10 aa, synthetic construct
NGEWSLAMDY

SEQ ID NO: 2102 - protein, 10 aa, synthetic construct
NGGLSLAMDY

SEQ ID NO: 2103 - protein, 10 aa, synthetic construct
NGGRSLAMDY

SEQ ID NO: 2104 - protein, 10 aa, synthetic construct
NGGWALAMDY

SEQ ID NO: 2105 - protein, 10 aa, synthetic construct
NGGWLLAMDY

SEQ ID NO: 2106 - protein, 10 aa, synthetic construct
NGGWPLAMDY

SEQ ID NO: 2107 - protein, 10 aa, synthetic construct
NGGWSLALDY

SEQ ID NO: 2108 - protein, 10 aa, synthetic construct
NGGWSLAMDC

SEQ ID NO: 2109 - protein, 10 aa, synthetic construct
NGGWSLAMDD

SEQ ID NO: 2110 - protein, 10 aa, synthetic construct
NGGWSLAMDF

SEQ ID NO: 2111 - protein, 10 aa, synthetic construct
NGGWSLAMDH

SEQ ID NO: 2112 - protein, 10 aa, synthetic construct
NGGWSLAMGY

SEQ ID NO: 2113 - protein, 10 aa, synthetic construct
NGGWSLAMNY

SEQ ID NO: 2114 - protein, 10 aa, synthetic construct
NGGWSLAMVY

SEQ ID NO: 2115 - protein, 10 aa, synthetic construct
NGGWSLAMYY

SEQ ID NO: 2116 - protein, 10 aa, synthetic construct
NGGWSLAVDY

SEQ ID NO: 2117 - protein, 10 aa, synthetic construct
NGGWSLPMDY

SEQ ID NO: 2118 - protein, 10 aa, synthetic construct
NGGWSLVMDY

SEQ ID NO: 2119 - protein, 10 aa, synthetic construct
NGGWSQAMDY

SEQ ID NO: 2120 - protein, 10 aa, synthetic construct
NGGWTLAMDY

SEQ ID NO: 2121 - protein, 10 aa, synthetic construct
NRGWSLAMDY

SEQ ID NO: 2122 - protein, 10 aa, synthetic construct
NVGWSLAMDY

SEQ ID NO: 2123 - protein, 10 aa, synthetic construct
SGGWSLAMDY

SEQ ID NO: 2124 - protein, 10 aa, synthetic construct
TGGWSLAMDY

SEQ ID NO: 2125 - protein, 15 aa, synthetic construct
YAQGYDYDEGYGMDY

SEQ ID NO: 2126 - protein, 8 aa, synthetic construct
GLPYFSCC

SEQ ID NO: 2127 - protein, 8 aa, synthetic construct
GVPYFSCC

SEQ ID NO: 2128 - protein, 8 aa, synthetic construct
SISSDGST

SEQ ID NO: 2129 - protein, 8 aa, synthetic construct
SISSGGST

SEQ ID NO: 2130 - protein, 7 aa, synthetic construct
ISSYGST

SEQ ID NO: 2131 - protein, 15 aa, synthetic construct
AAYPRQLGPYYAMDY

SEQ ID NO: 2132 - protein, 15 aa, synthetic construct
AASPRHLGPYYAMDY

SEQ ID NO: 2133 - protein, 15 aa, synthetic construct
AASPRKLGPYYAMDY

SEQ ID NO: 2134 - protein, 15 aa, synthetic construct
AASPRQHGPYYAMDY

SEQ ID NO: 2135 - protein, 15 aa, synthetic construct
AASPRQLGPYYAIDY

SEQ ID NO: 2136 - protein, 15 aa, synthetic construct
AASPRQLRPYYAMDY

SEQ ID NO: 2137 - protein, 15 aa, synthetic construct
AASPRQLWPYYAMDY

SEQ ID NO: 2138 - protein, 15 aa, synthetic construct
AASPRQRGPYYAMDY

SEQ ID NO: 2139 - protein, 15 aa, synthetic construct
AASPRRLGPYYAMDY

SEQ ID NO: 2140 - protein, 15 aa, synthetic construct
AASPTQLGPYYAMDY

SEQ ID NO: 2141 - protein, 15 aa, synthetic construct
ATSPRQLGPYYAMDY

SEQ ID NO: 2142 - protein, 118 aa, synthetic construct
ELQLVESGGGLVQPGGSLRLSCAASGFTLDYYAIGWFRQAPGKEREGVSYISSSGGSTNYADSVKGRFTISRDNAKNTVYLQMNSLKPEDSAVYYCAAAGGYRNSSRYWGQGTSVTVS

SEQ ID NO: 2143 - protein, 117 aa, synthetic construct
LHLVESGGGLVQPGGSLRLSCAASGFTLDYYAIGWFRQAPGKEREGVSYISSSGGSTNYADSVKGRFTISRDNAKNTVYLQMNSLKPEDSAVYYCAAAGGYGNSSRYWGQGTSVTVS

SEQ ID NO: 2144 - protein, 117 aa, synthetic construct
LHLVESGGGLVQPGGSLRLSCAASGFTLDYYAIGWFRQAPGKEREGVSYISSSGGSTNYADSVKGRFTVSRDNAKNTVYLQMNSLKPEDSAVYYCAAAGGYRNSSRYWGQGTSVTVS

SEQ ID NO: 2145 - protein, 117 aa, synthetic construct
LQLVESGGGFVQPGGSLRLSCAASGFTLDYYAIGWFRQAPGKEREGVSYISSSGGSTNYADSVKGRFTVSRDNAKNTVYLQMNSLKPEDSAVYYCAAAGGYRNSSRYWGQGTSVTVS

SEQ ID NO: 2146 - protein, 117 aa, synthetic construct
LQLVESGGGLVQPGGSLRLSCAASGCTLDYYAIGWFRQAPGKEREGVSYISSSGGSTNYADSVKGRFTISRDNAKNTVYLQMNSLKPEDSAVYSCAAAGGYRNSSRYWGQGTSVTVS

SEQ ID NO: 2147 - protein, 117 aa, synthetic construct
LQLVESGGGLVQPGGSLRLSCAASGFTLDSYAIGWFRQAPGKEREGVSYISSSGGSTNYADGVKGRFTISRDNAKNTVYLQMNSLKPEDTAIYYCAAAGGYGNSSRYWGQGTSVTVS

SEQ ID NO: 2148 - protein, 117 aa, synthetic construct
LQLVESGGGLVQPGGSLRLSCAASGFTLDSYAIGWFRQAPGKEREGVSYISSSGGSTNYADGVKGRFTISRDNAKNTVYLQMNSLKPEDTAVYYCAAAGGYGNSSRYWGQGTSVTVS

SEQ ID NO: 2149 - protein, 117 aa, synthetic construct
LQLVESGGGLVQPGGSLRLSCAASGFTLDSYAIGWFRQAPGKEREGVSYISSSGGSTNYADSVKGRFTISRDNAKNTVYLQMNSLKPEDSAVYYCAAAGGYGNSSRYWGQGTSVTVS

SEQ ID NO: 2150 - protein, 117 aa, synthetic construct
LQLVESGGGLVQPGGSLRLSCAASGFTLDSYAIGWFRQAPGKEREGVSYISSSGGSTNYADSVKGRFTISRDNAKNTVYLQMNSLKPEDSAVYYCAAAGGYRNSSRYWGQGTSVTVS

SEQ ID NO: 2151 - protein, 117 aa, synthetic construct
LQLVESGGGLVQPGGSLRLSCAASGFTLDSYAIGWFRQAPGKEREGVSYISSSGGSTNYADSVKGRFTISRDNAKNTVYLQMNSLKPEDTAIYYCAAAGGYGNSSRYWGQGTSVTVS

SEQ ID NO: 2152 - protein, 117 aa, synthetic construct
LQLVESGGGLVQPGGSLRLSCAASGFTLDSYAIGWFRQAPGKEREGVSYISSSGGSTNYADSVKGRFTISRDNAKNTVYLQMNSLKPEDTAVYYCAAAGGYGNSSRYWGQGTSVTVS

SEQ ID NO: 2153 - protein, 117 aa, synthetic construct
LQLVESGGGLVQPGGSLRLSCAASGFTLDSYAIGWFRQAPGKEREGVSYISSSGGSTNYADSVKGRFTISRDNAKNTVYLQMNSLKPEDTAVYYCAAAGGYRNSSRYWGQGTSVTVS

SEQ ID NO: 2154 - protein, 117 aa, synthetic construct
LQLVESGGGLVQPGGSLRLSCAASGFTLDSYAIGWFRQAPGKEREGVSYISSSGGSTNYADSVKGRFTISRDNAKNTVYLQMNSLKPEDTAVYYCAAAGGYTNSSRYWGQGTSVTVS

SEQ ID NO: 2155 - protein, 117 aa, synthetic construct
LQLVESGGGLVQPGGSLRLSCAASGFTLDSYAIGWFRQAPGKEREGVSYISSSGGSTNYADSVKGRFTISRDNAKNTVYLQMNSLKPEDTGVYYCAAAGGYGNSSRYWGQGTSVTVS

SEQ ID NO: 2156 - protein, 117 aa, synthetic construct
LQLVESGGGLVQPGGSLRLSCAASGFTLDSYAIGWFRQAPGKEREGVSYISSSGGSTNYADSVKGRFTISRDNAKNTVYLQMNSLKPEDTGVYYCAAAGGYRNSSRYWGQGTSVTVS

SEQ ID NO: 2157 - protein, 117 aa, synthetic construct
LQLVESGGGLVQPGGSLRLSCAASGFTLDSYAIGWFRQAPGKEREGVSYISSSGGSTNYADSVKGRFTVSRDNAKNTVYLQMNSLKPEDSAVYYCAAAGGYGNSSRYWGQGTSVTVS

SEQ ID NO: 2158 - protein, 117 aa, synthetic construct
LQLVESGGGLVQPGGSLRLSCAASGFTLDSYAIGWFRQAPGKEREGVSYISSSGGSTNYADSVKGRFTVSRDNAKNTVYLQMNSLKPEDSAVYYCAAAGGYRNSSRYWGQGTSVTVS

SEQ ID NO: 2159 - protein, 117 aa, synthetic construct
LQLVESGGGLVQPGGSLRLSCAASGFTLDSYAIGWFRQAPGKEREGVSYISSSGGSTNYADSVKGRFTVSRDNAKNTVYLQMNSLKPEDTAVYYCAAAGGYGNSSRYWGQGTSVTVS

SEQ ID NO: 2160 - protein, 117 aa, synthetic construct
LQLVESGGGLVQPGGSLRLSCAASGFTLDSYAIGWFRQAPGKEREGVSYISSSGGSTNYADSVKGRFTVSRDNAKNTVYLQMNSLKPEDTAVYYCAAAGGYTNSSRYWGQGTSVTVS

SEQ ID NO: 2161 - protein, 117 aa, synthetic construct
LQLVESGGGLVQPGGSLRLSCAASGFTLDSYAIGWSRQAPGKEREGVSCISSSGGSTNYADSVKGRFTISRDNAKNTVYLQMNSLKPEDTAIYYCAAAGGYGNSSRYWGQGTSVTVS

SEQ ID NO: 2162 - protein, 117 aa, synthetic construct
LQLVESGGGLVQPGGSLRLSCAASGFTLDYFAIGWFRQAPGKEREGVSYISSSGGSTNYADGVKGRFTISRDNAKNTVYLQMNSLKPEDTAIYYCAAAGGYGNSSRYWGQGTSVTVS

SEQ ID NO: 2163 - protein, 117 aa, synthetic construct
LQLVESGGGLVQPGGSLRLSCAASGFTLDYFAIGWFRQAPGKEREGVSYISSSGGSTNYADSVKGRFTISRDNAKNTVYLQMNSLKPEDSAVYYCAAAGGYGNSSRYWGQGTSVTVS

SEQ ID NO: 2164 - protein, 117 aa, synthetic construct
LQLVESGGGLVQPGGSLRLSCAASGFTLDYFAIGWFRQAPGKEREGVSYISSSGGSTNYADSVKGRFTISRDNAKNTVYLQMNSLKPEDSAVYYCAAAGGYRNSSRYWGQGTSVTVS

SEQ ID NO: 2165 - protein, 117 aa, synthetic construct
LQLVESGGGLVQPGGSLRLSCAASGFTLDYFAIGWFRQAPGKEREGVSYISSSGGSTNYADSVKGRFTISRDNAKNTVYLQMNSLKPEDSAVYYCAAAGGYTNSSRYWGQGTSVTVS

SEQ ID NO: 2166 - protein, 117 aa, synthetic construct
LQLVESGGGLVQPGGSLRLSCAASGFTLDYFAIGWFRQAPGKEREGVSYISSSGGSTNYADSVKGRFTISRDNAKNTVYLQMNSLKPEDTAIYYCAAAGGYGNSSRYWGQGTSVTVS

SEQ ID NO: 2167 - protein, 117 aa, synthetic construct
LQLVESGGGLVQPGGSLRLSCAASGFTLDYFAIGWFRQAPGKEREGVSYISSSGGSTNYADSVKGRFTISRDNAKNTVYLQMNSLKPEDTAVYSCAAAGGYRNSSRYWGQGTSVTVS

SEQ ID NO: 2168 - protein, 117 aa, synthetic construct
LQLVESGGGLVQPGGSLRLSCAASGFTLDYFAIGWFRQAPGKEREGVSYISSSGGSTNYADSVKGRFTISRDNAKNTVYLQMNSLKPEDTAVYYCAAAGGYGNSSRYWGQGTSVTVS

SEQ ID NO: 2169 - protein, 117 aa, synthetic construct
LQLVESGGGLVQPGGSLRLSCAASGFTLDYFAIGWFRQAPGKEREGVSYISSSGGSTNYADSVKGRFTISRDNAKNTVYLQMNSLKPEDTAVYYCAAAGGYRNSSRYWGQGTSVTVS

SEQ ID NO: 2170 - protein, 117 aa, synthetic construct
LQLVESGGGLVQPGGSLRLSCAASGFTLDYFAIGWFRQAPGKEREGVSYISSSGGSTNYADSVKGRFTISRDNAKNTVYLQMNSLKPEDTAVYYCAAAGGYTNSSRYWGQGTSVTVS

SEQ ID NO: 2171 - protein, 111 aa, synthetic construct
LQLVESGGGLVQPGGSLRLSCAASGFTLDYFAIGWFRQAPGKEREGVSYISSSGGSTNYADSVKGRFTISRDNAKNTVYLQMNSLKPEDTAVYYCAADWPPGGQGTLVTVS

SEQ ID NO: 2172 - protein, 117 aa, synthetic construct
LQLVESGGGLVQPGGSLRLSCAASGFTLDYFAIGWFRQAPGKEREGVSYISSSGGSTNYADSVKGRFTVSRDNAKNTVYLQMNSLKPEDSAVYYCAAAGGYGNSSRYWGQGTSVTVS

SEQ ID NO: 2173 - protein, 117 aa, synthetic construct
LQLVESGGGLVQPGGSLRLSCAASGFTLDYFAIGWFRQAPGKEREGVSYISSSGGSTNYADSVKGRFTVSRDNAKNTVYLQMNSLKPEDSAVYYCAAAGGYRNSSRYWGQGTSVTVS

SEQ ID NO: 2174 - protein, 117 aa, synthetic construct
LQLVESGGGLVQPGGSLRLSCAASGFTLDYFAIGWFRQAPGKEREGVSYISSSGGSTNYADSVKGRFTVSRDNAKNTVYLQMNSLKPEDTAVYYCAAAGGYGNSSRYWGQGTSVTVS

SEQ ID NO: 2175 - protein, 117 aa, synthetic construct
LQLVESGGGLVQPGGSLRLSCAASGFTLDYFAIGWFRQAPGKEREGVSYISSSGGSTNYADSVKGRFTVSRDNAKNTVYLQMNSLKPEDTAVYYCAAAGGYTNSSRYWGQGTSVTVS

SEQ ID NO: 2176 - protein, 117 aa, synthetic construct
LQLVESGGGLVQPGGSLRLSCAASGFTLDYYAIGWFRQAPGEEREGVSYISSSGGSTNYADSVKGRFTISRDNAKNTVYLQMNSLKPEDSAVYYCAAAGGYRNSSRYWGQGTSVTVS

SEQ ID NO: 2177 - protein, 117 aa, synthetic construct
LQLVESGGGLVQPGGSLRLSCAASGFTLDYYAIGWFRQAPGKEREGVAYISSSGGSTNYADSVKGRFTISRDNAKNTVYLQMNSLKPEDSAVYSCAAAGGYGNSSRYWGQGTSVTVS

SEQ ID NO: 2178 - protein, 117 aa, synthetic construct
LQLVESGGGLVQPGGSLRLSCAASGFTLDYYAIGWFRQAPGKEREGVAYISSSGGSTNYADSVKGRFTISRDNAKNTVYLQMNSLKPEDSAVYSCAAAGGYRNSSRYWGQGTSVTVS

SEQ ID NO: 2179 - protein, 117 aa, synthetic construct
LQLVESGGGLVQPGGSLRLSCAASGFTLDYYAIGWFRQAPGKEREGVAYISSSGGSTNYADSVKGRFTISRDNAKNTVYLQMNSLKPEDSAVYYCAAAGGYGNSSRYWGQGTSVTVS

SEQ ID NO: 2180 - protein, 117 aa, synthetic construct
LQLVESGGGLVQPGGSLRLSCAASGFTLDYYAIGWFRQAPGKEREGVAYISSSGGSTNYADSVKGRFTISRDNAKNTVYLQMNSLKPEDSAVYYCAAAGGYRNSSRYWGQGTSVTVS

SEQ ID NO: 2181 - protein, 117 aa, synthetic construct
LQLVESGGGLVQPGGSLRLSCAASGFTLDYYAIGWFRQAPGKEREGVAYISSSGGSTNYADSVKGRFTISRDNAKNTVYLQMNSLKPEDTAVYSCAAAGGYRNSSRYWGQGTSVTVS

SEQ ID NO: 2182 - protein, 117 aa, synthetic construct
LQLVESGGGLVQPGGSLRLSCAASGFTLDYYAIGWFRQAPGKEREGVAYISSSGGSTNYADSVKGRFTISRDNAKNTVYLQMNSLKPEDTAVYYCAAAGGYGNSSRYWGQGTSVTVS

SEQ ID NO: 2183 - protein, 117 aa, synthetic construct
LQLVESGGGLVQPGGSLRLSCAASGFTLDYYAIGWFRQAPGKEREGVAYISSSGGSTNYADSVKGRFTISRDNAKNTVYLQMNSLKPEDTAVYYCAAAGGYRNSSRYWGQGTSVTVS

SEQ ID NO: 2184 - protein, 117 aa, synthetic construct
LQLVESGGGLVQPGGSLRLSCAASGFTLDYYAIGWFRQAPGKEREGVAYISSSGGSTNYADSVKGRFTISRNNAKNTVYLQMNSLKPEDTAVYYCAAAGGYGNSSRYWGQGTSVTVS

SEQ ID NO: 2185 - protein, 117 aa, synthetic construct
LQLVESGGGLVQPGGSLRLSCAASGFTLDYYAIGWFRQAPGKEREGVAYISSSGGSTNYADSVKGRFTVSRDNAKNTVYLQMNSLKPEDSAVYYCAAAGGYGNSSRYWGQGTSVTVS

SEQ ID NO: 2186 - protein, 117 aa, synthetic construct
LQLVESGGGLVQPGGSLRLSCAASGFTLDYYAIGWFRQAPGKEREGVAYISSSGGSTNYADSVKGRFTVSRDNAKNTVYLQMNSLKPEDSAVYYCAAAGGYRNSSRYWGQGTSVTVS

SEQ ID NO: 2187 - protein, 117 aa, synthetic construct
LQLVESGGGLVQPGGSLRLSCAASGFTLDYYAIGWFRQAPGKEREGVSCISSSGGSTNYADSVKGRFTISRDNAKNTVYLQMNSLKPEDSAVYSCAAAGGYGNSSRYWGQGTSVTVS

SEQ ID NO: 2188 - protein, 117 aa, synthetic construct
LQLVESGGGLVQPGGSLRLSCAASGFTLDYYAIGWFRQAPGKEREGVSCISSSGGSTNYADSVKGRFTISRDNAKNTVYLQMNSLKPEDSAVYSCAAAGGYRNSSRYWGQGTSVTVS

SEQ ID NO: 2189 - protein, 117 aa, synthetic construct
LQLVESGGGLVQPGGSLRLSCAASGFTLDYYAIGWFRQAPGKEREGVSCISSSGGSTNYADSVKGRFTISRDNAKNTVYLQMNSLKPEDSAVYYCAAAGGYGNSSRYWGQGTSVTVS

SEQ ID NO: 2190 - protein, 117 aa, synthetic construct
LQLVESGGGLVQPGGSLRLSCAASGFTLDYYAIGWFRQAPGKEREGVSCISSSGGSTNYADSVKGRFTISRDNAKNTVYLQMNSLKPEDSAVYYCAAAGGYRNSSRYWGQGTSVTVS

SEQ ID NO: 2191 - protein, 117 aa, synthetic construct
LQLVESGGGLVQPGGSLRLSCAASGFTLDYYAIGWFRQAPGKEREGVSCISSSGGSTNYADSVKGRFTISRDNAKNTVYLQMNSLKPEDTAIYYCAAAGGYGNSSRYWGQGTSVTVS

SEQ ID NO: 2192 - protein, 117 aa, synthetic construct
LQLVESGGGLVQPGGSLRLSCAASGFTLDYYAIGWFRQAPGKEREGVSCISSSGGSTNYADSVKGRFTISRDNAKNTVYLQMNSLKPEDTAVYYCAAAGGYGNSSRYWGQGTSVTVS

SEQ ID NO: 2193 - protein, 117 aa, synthetic construct
LQLVESGGGLVQPGGSLRLSCAASGFTLDYYAIGWFRQAPGKEREGVSCISSSGGSTNYADSVKGRFTISRDNAKNTVYLQMNSLKPEDTAVYYCAAAGGYRNSSRYWGQGTSVTVS

SEQ ID NO: 2194 - protein, 117 aa, synthetic construct
LQLVESGGGLVQPGGSLRLSCAASGFTLDYYAIGWFRQAPGKEREGVSCISSSGGSTNYADSVKGRFTVSRDNAKNTVYLQMNSLKPEDSAVYYCAAAGGYRNSSRYWGQGTSVTVS

SEQ ID NO: 2195 - protein, 117 aa, synthetic construct
LQLVESGGGLVQPGGSLRLSCAASGFTLDYYAIGWFRQAPGKEREGVSHISSSGGSTNYADSVKGRFTISRDNAKNTVYLQMNSLKPEDTAVYSCAAAGGYRNSSRYWGQGTSVTVS

SEQ ID NO: 2196 - protein, 117 aa, synthetic construct
LQLVESGGGLVQPGGSLRLSCAASGFTLDYYAIGWFRQAPGKEREGVSYICSSGGSTNYADSVKGRFTISRDNAKNTVYLQMNSLKPEDSAVYYCAAAGGYRNSSRYWGQGTSVTVS

SEQ ID NO: 2197 - protein, 117 aa, synthetic construct
LQLVESGGGLVQPGGSLRLSCAASGFTLDYYAIGWFRQAPGKEREGVSYISSSGGSSNYADSVKGRFTVSRDNAKNTVYLQMNSLKPEDSAVYYCAAAGGYGNSSRYWGQGTSVTVS

SEQ ID NO: 2198 - protein, 117 aa, synthetic construct
LQLVESGGGLVQPGGSLRLSCAASGFTLDYYAIGWFRQAPGKEREGVSYISSSGGSTNYADGVKGRFTISRDNAKNTVYLQMNSLKPEDSAVYYCAAAGGYGNSSRYWGQGTSVTVS

SEQ ID NO: 2199 - protein, 117 aa, synthetic construct
LQLVESGGGLVQPGGSLRLSCAASGFTLDYYAIGWFRQAPGKEREGVSYISSSGGSTNYADGVKGRFTISRDNAKNTVYLQMNSLKPEDSAVYYCAAAGGYRNSSRYWGQGTSVTVS

SEQ ID NO: 2200 - protein, 117 aa, synthetic construct
LQLVESGGGLVQPGGSLRLSCAASGFTLDYYAIGWFRQAPGKEREGVSYISSSGGSTNYADGVKGRFTISRDNAKNTVYLQMNSLKPEDSAVYYCAAAGGYTNSSRYWGQGTSVTVS

SEQ ID NO: 2201 - protein, 117 aa, synthetic construct
LQLVESGGGLVQPGGSLRLSCAASGFTLDYYAIGWFRQAPGKEREGVSYISSSGGSTNYADGVKGRFTISRDNAKNTVYLQMNSLKPEDTAIYYCAAAGGYGNSSRYWGQGASVTVS

SEQ ID NO: 2202 - protein, 117 aa, synthetic construct
LQLVESGGGLVQPGGSLRLSCAASGFTLDYYAIGWFRQAPGKEREGVSYISSSGGSTNYADGVKGRFTISRDNAKNTVYLQMNSLKPEDTAIYYCAAAGGYGNSSRYWGQGTSVTVS

SEQ ID NO: 2203 - protein, 117 aa, synthetic construct
LQLVESGGGLVQPGGSLRLSCAASGFTLDYYAIGWFRQAPGKEREGVSYISSSGGSTNYADGVKGRFTISRDNAKNTVYLQMNSLKPEDTAIYYCAAAGGYGNSSRYWGQGTTVTVS

SEQ ID NO: 2204 - protein, 117 aa, synthetic construct
LQLVESGGGLVQPGGSLRLSCAASGFTLDYYAIGWFRQAPGKEREGVSYISSSGGSTNYADGVKGRFTISRDNAKNTVYLQMNSLKPEDTAIYYCAAAGGYRNSSRYWGQGTSVTVS

SEQ ID NO: 2205 - protein, 117 aa, synthetic construct
LQLVESGGGLVQPGGSLRLSCAASGFTLDYYAIGWFRQAPGKEREGVSYISSSGGSTNYADGVKGRFTISRDNAKNTVYLQMNSLKPEDTAIYYCAAAGGYTNSSRYWGQGTSVTVS

SEQ ID NO: 2206 - protein, 117 aa, synthetic construct
LQLVESGGGLVQPGGSLRLSCAASGFTLDYYAIGWFRQAPGKEREGVSYISSSGGSTNYADGVKGRFTISRDNAKNTVYLQMNSLKPEDTAVYYCAAAGGYGNSSRYWGQGTSVTVS

SEQ ID NO: 2207 - protein, 117 aa, synthetic construct
LQLVESGGGLVQPGGSLRLSCAASGFTLDYYAIGWFRQAPGKEREGVSYISSSGGSTNYADGVKGRFTISRDNAKNTVYLQMNSLKPEDTAVYYCAAAGGYRNSSRYWGQGTSVTVS

SEQ ID NO: 2208 - protein, 117 aa, synthetic construct
LQLVESGGGLVQPGGSLRLSCAASGFTLDYYAIGWFRQAPGKEREGVSYISSSGGSTNYADGVKGRFTISRDNAKNTVYLQMNSLKPEDTAVYYCAAAGGYTNSSRYWGQGTSVTVS

SEQ ID NO: 2209 - protein, 111 aa, synthetic construct
LQLVESGGGLVQPGGSLRLSCAASGFTLDYYAIGWFRQAPGKEREGVSYISSSGGSTNYADGVKGRFTISRDNAKNTVYLQMNSLKPEDTAVYYCAADWPPGGQGTLVTVS

SEQ ID NO: 2210 - protein, 117 aa, synthetic construct
LQLVESGGGLVQPGGSLRLSCAASGFTLDYYAIGWFRQAPGKEREGVSYISSSGGSTNYADGVKGRFTISRDNAKNTVYLQMNSLKPEDTGVYYCAAAGGYGNSSRYWGQGTSVTVS

SEQ ID NO: 2211 - protein, 117 aa, synthetic construct
LQLVESGGGLVQPGGSLRLSCAASGFTLDYYAIGWFRQAPGKEREGVSYISSSGGSTNYADGVKGRFTISRDNAKNTVYLQMNSLKPEDTGVYYCAAAGGYRNSSRYWGQGTSVTVS

SEQ ID NO: 2212 - protein, 117 aa, synthetic construct
LQLVESGGGLVQPGGSLRLSCAASGFTLDYYAIGWFRQAPGKEREGVSYISSSGGSTNYADGVKGRFTISRDNAKNTVYLQMNSLKPEDTGVYYCAAAGGYTNSSRYWGQGTSVTVS

SEQ ID NO: 2213 - protein, 117 aa, synthetic construct
LQLVESGGGLVQPGGSLRLSCAASGFTLDYYAIGWFRQAPGKEREGVSYISSSGGSTNYADGVKGRFTVSRDNAKNTVYLQMNSLKPEDSAVYYCAAAGGYGNSSRYWGQGTSVTVS

SEQ ID NO: 2214 - protein, 117 aa, synthetic construct
LQLVESGGGLVQPGGSLRLSCAASGFTLDYYAIGWFRQAPGKEREGVSYISSSGGSTNYADGVKGRFTVSRDNAKNTVYLQMNSLKPEDSAVYYCAAAGGYRNSSRYWGQGTSVTVS

SEQ ID NO: 2215 - protein, 117 aa, synthetic construct
LQLVESGGGLVQPGGSLRLSCAASGFTLDYYAIGWFRQAPGKEREGVSYISSSGGSTNYADGVKGRFTVSRDNAKNTVYLQMNSLKPEDTAVYYCAAAGGYGNSSRYWGQGTSVTVS

SEQ ID NO: 2216 - protein, 117 aa, synthetic construct
LQLVESGGGLVQPGGSLRLSCAASGFTLDYYAIGWFRQAPGKEREGVSYISSSGGSTNYADSVKGRFSISRDNAKNTVYLQMNSLKPEDSAVYSCAAAGGYRNSSRYWGQGTSVTVS

SEQ ID NO: 2217 - protein, 117 aa, synthetic construct
LQLVESGGGLVQPGGSLRLSCAASGFTLDYYAIGWFRQAPGKEREGVSYISSSGGSTNYADSVKGRFSISRDNAKNTVYLQMNSLKPEDSAVYYCAAAGGYGNSSRYWGQGTSVTVS

SEQ ID NO: 2218 - protein, 117 aa, synthetic construct
LQLVESGGGLVQPGGSLRLSCAASGFTLDYYAIGWFRQAPGKEREGVSYISSSGGSTNYADSVKGRFSISRDNAKNTVYLQMNSLKPEDSAVYYCAAAGGYRNSSRYWGQGTSVTVS

SEQ ID NO: 2219 - protein, 117 aa, synthetic construct
LQLVESGGGLVQPGGSLRLSCAASGFTLDYYAIGWFRQAPGKEREGVSYISSSGGSTNYADSVKGRFSISRDNAKNTVYLQMNSLKPEDTAVYSCAAAGGYRNSSRYWGQGTSVTVS

SEQ ID NO: 2220 - protein, 117 aa, synthetic construct
LQLVESGGGLVQPGGSLRLSCAASGFTLDYYAIGWFRQAPGKEREGVSYISSSGGSTNYADSVKGRFSISRDNAKNTVYLQMNSLKPEDTAVYYCAAAGGYGNSSRYWGQGTSVTVS

SEQ ID NO: 2221 - protein, 111 aa, synthetic construct
LQLVESGGGLVQPGGSLRLSCAASGFTLDYYAIGWFRQAPGKEREGVSYISSSGGSTNYADSVKGRFTISQDNAKNTVYLQMNSLKPEDTAVYYCAADWPPGGQGTLVTVS

SEQ ID NO: 2222 - protein, 117 aa, synthetic construct
LQLVESGGGLVQPGGSLRLSCAASGFTLDYYAIGWFRQAPGKEREGVSYISSSGGSTNYADSVKGRFTISRDNAKNTAYLQMNSLKPEDSAVYYCAAAGGYGNSSRYWGQGTSVTVS

SEQ ID NO: 2223 - protein, 117 aa, synthetic construct
LQLVESGGGLVQPGGSLRLSCAASGFTLDYYAIGWFRQAPGKEREGVSYISSSGGSTNYADSVKGRFTISRDNAKNTVFLQMNSLKPEDSAVYYCAAAGGYGNSSRYWGQGTSVTVS

SEQ ID NO: 2224 - protein, 117 aa, synthetic construct
LQLVESGGGLVQPGGSLRLSCAASGFTLDYYAIGWFRQAPGKEREGVSYISSSGGSTNYADSVKGRFTISRDNAKNTVFLQMNSLKPEDSAVYYCAAAGGYRNSSRYWGQGTSVTVS

SEQ ID NO: 2225 - protein, 117 aa, synthetic construct
LQLVESGGGLVQPGGSLRLSCAASGFTLDYYAIGWFRQAPGKEREGVSYISSSGGSTNYADSVKGRFTISRDNAKNTVFLQMNSLKPEDTAIYYCAAAGGYGNSSRYWGQGTSVTVS

SEQ ID NO: 2226 - protein, 117 aa, synthetic construct
LQLVESGGGLVQPGGSLRLSCAASGFTLDYYAIGWFRQAPGKEREGVSYISSSGGSTNYADSVKGRFTISRDNAKNTVFLQMNSLKPEDTAVYYCAAAGGYGNSSRYWGQGTSVTVS

SEQ ID NO: 2227 - protein, 117 aa, synthetic construct
LQLVESGGGLVQPGGSLRLSCAASGFTLDYYAIGWFRQAPGKEREGVSYISSSGGSTNYADSVKGRFTISRDNAKNTVFLQMNSLKPEDTAVYYCAAAGGYRNSSRYWGQGTSVTVS

SEQ ID NO: 2228 - protein, 117 aa, synthetic construct
LQLVESGGGLVQPGGSLRLSCAASGFTLDYYAIGWFRQAPGKEREGVSYISSSGGSTNYADSVKGRFTISRDNAKNTVFLQMNSLKPEDTAVYYCAAAGGYTNSSRYWGQGTSVTVS

SEQ ID NO: 2229 - protein, 117 aa, synthetic construct
LQLVESGGGLVQPGGSLRLSCAASGFTLDYYAIGWFRQAPGKEREGVSYISSSGGSTNYADSVKGRFTISRDNAKNTVFLQMNSLKPEDTGVYYCAAAGGYGNSSRYWGQGTSVTVS

SEQ ID NO: 2230 - protein, 117 aa, synthetic construct
LQLVESGGGLVQPGGSLRLSCAASGFTLDYYAIGWFRQAPGKEREGVSYISSSGGSTNYADSVKGRFTISRDNAKNTVFLQMNSLKPEDTGVYYCAAAGGYRNSSRYWGQGTSVTVS

SEQ ID NO: 2231 - protein, 117 aa, synthetic construct
LQLVESGGGLVQPGGSLRLSCAASGFTLDYYAIGWFRQAPGKEREGVSYISSSGGSTNYADSVKGRFTISRDNAKNTVSLQMNSLKPEDSAVYYCAAAGGYRNSSRYWGQGTSVTVS

SEQ ID NO: 2232 - protein, 117 aa, synthetic construct
LQLVESGGGLVQPGGSLRLSCAASGFTLDYYAIGWFRQAPGKEREGVSYISSSGGSTNYADSVKGRFTISRDNAKNTVSLQMNSLKPEDTAVYYCAAAGGYGNSSRYWGQGTSVTVS

SEQ ID NO: 2233 - protein, 117 aa, synthetic construct
LQLVESGGGLVQPGGSLRLSCAASGFTLDYYAIGWFRQAPGKEREGVSYISSSGGSTNYADSVKGRFTISRDNAKNTVSLQMNSLKPEDTAVYYCAAAGGYRNSSRYWGQGTSVTVS

SEQ ID NO: 2234 - protein, 117 aa, synthetic construct
LQLVESGGGLVQPGGSLRLSCAASGFTLDYYAIGWFRQAPGKEREGVSYISSSGGSTNYADSVKGRFTISRDNAKNTVSLQMNSLKPEDTGVYYCAAAGGYRNSSRYWGQGTSVTVS

SEQ ID NO: 2235 - protein, 117 aa, synthetic construct
LQLVESGGGLVQPGGSLRLSCAASGFTLDYYAIGWFRQAPGKEREGVSYISSSGGSTNYADSVKGRFTISRDNAKNTVYLQMHNLKPEDSAVYYCAAAGGYGNSSRYWGQGTSVTVS

SEQ ID NO: 2236 - protein, 117 aa, synthetic construct
LQLVESGGGLVQPGGSLRLSCAASGFTLDYYAIGWFRQAPGKEREGVSYISSSGGSTNYADSVKGRFTISRDNAKNTVYLQMHNLKPEDSAVYYCAAAGGYRNSSRYWGQGTSVTVS

SEQ ID NO: 2237 - protein, 117 aa, synthetic construct
LQLVESGGGLVQPGGSLRLSCAASGFTLDYYAIGWFRQAPGKEREGVSYISSSGGSTNYADSVKGRFTISRDNAKNTVYLQMHNLKPEDTAIYYCAAAGGYGNSSRYWGQGTSVTVS

SEQ ID NO: 2238 - protein, 117 aa, synthetic construct
LQLVESGGGLVQPGGSLRLSCAASGFTLDYYAIGWFRQAPGKEREGVSYISSSGGSTNYADSVKGRFTISRDNAKNTVYLQMHNLKPEDTAVYYCAAAGGYGNSSRYWGQGTSVTVS

SEQ ID NO: 2239 - protein, 117 aa, synthetic construct
LQLVESGGGLVQPGGSLRLSCAASGFTLDYYAIGWFRQAPGKEREGVSYISSSGGSTNYADSVKGRFTISRDNAKNTVYLQMHNLKPEDTAVYYCAAAGGYRNSSRYWGQGTSVTVS

SEQ ID NO: 2240 - protein, 117 aa, synthetic construct
LQLVESGGGLVQPGGSLRLSCAASGFTLDYYAIGWFRQAPGKEREGVSYISSSGGSTNYADSVKGRFTISRDNAKNTVYLQMHNLKPEDTAVYYCAAAGGYTNSSRYWGQGTSVTVS

SEQ ID NO: 2241 - protein, 117 aa, synthetic construct
LQLVESGGGLVQPGGSLRLSCAASGFTLDYYAIGWFRQAPGKEREGVSYISSSGGSTNYADSVKGRFTISRDNAKNTVYLQMHNLKPEDTGVYYCAAAGGYGNSSRYWGQGTSVTVS

SEQ ID NO: 2242 - protein, 117 aa, synthetic construct
LQLVESGGGLVQPGGSLRLSCAASGFTLDYYAIGWFRQAPGKEREGVSYISSSGGSTNYADSVKGRFTISRDNAKNTVYLQMHSLKPEDTAVYYCAAAGGYGNSSRYWGQGTSVTVS

SEQ ID NO: 2243 - protein, 117 aa, synthetic construct
LQLVESGGGLVQPGGSLRLSCAASGFTLDYYAIGWFRQAPGKEREGVSYISSSGGSTNYADSVKGRFTISRDNAKNTVYLQMHSLKPEDTAVYYCAAAGGYRNSSRYWGQGTSVTVS

SEQ ID NO: 2244 - protein, 117 aa, synthetic construct
LQLVESGGGLVQPGGSLRLSCAASGFTLDYYAIGWFRQAPGKEREGVSYISSSGGSTNYADSVKGRFTISRDNAKNTVYLQMHSLKPEDTAVYYCAAAGGYTNSSRYWGQGTSVTVS

SEQ ID NO: 2245 - protein, 117 aa, synthetic construct
LQLVESGGGLVQPGGSLRLSCAASGFTLDYYAIGWFRQAPGKEREGVSYISSSGGSTNYADSVKGRFTISRDNAKNTVYLQMNNLKPEDSAVYYCAAAGGYRNSSRYWGQGTSVTVS

SEQ ID NO: 2246 - protein, 117 aa, synthetic construct
LQLVESGGGLVQPGGSLRLSCAASGFTLDYYAIGWFRQAPGKEREGVSYISSSGGSTNYADSVKGRFTISRDNAKNTVYLQMNSLKPEDSAVYSCAAAGGYGNSSRYWGPGTSVTVS

SEQ ID NO: 2247 - protein, 117 aa, synthetic construct
LQLVESGGGLVQPGGSLRLSCAASGFTLDYYAIGWFRQAPGKEREGVSYISSSGGSTNYADSVKGRFTISRDNAKNTVYLQMNSLKPEDSAVYSCAAAGGYTNSSRYWGQGTSVTVS

SEQ ID NO: 2248 - protein, 117 aa, synthetic construct
LQLVESGGGLVQPGGSLRLSCAASGFTLDYYAIGWFRQAPGKEREGVSYISSSGGSTNYADSVKGRFTISRDNAKNTVYLQMNSLKPEDSAVYYCAAAGGYGNFSRYWGQGTSVTVS

SEQ ID NO: 2249 - protein, 117 aa, synthetic construct
LQLVESGGGLVQPGGSLRLSCAASGFTLDYYAIGWFRQAPGKEREGVSYISSSGGSTNYADSVKGRFTISRDNAKNTVYLQMNSLKPEDSAVYYCAAAGGYGNSPRYWGQGTSVTVS

SEQ ID NO: 2250 - protein, 117 aa, synthetic construct
LQLVESGGGLVQPGGSLRLSCAASGFTLDYYAIGWFRQAPGKEREGVSYISSSGGSTNYADSVKGRFTISRDNAKNTVYLQMNSLKPEDSAVYYCAAAGGYGNSSRHWGQGTSVTVS

SEQ ID NO: 2251 - protein, 117 aa, synthetic construct
LQLVESGGGLVQPGGSLRLSCAASGFTLDYYAIGWFRQAPGKEREGVSYISSSGGSTNYADSVKGRFTISRDNAKNTVYLQMNSLKPEDSAVYYCAAAGGYGNSSRYWGPGTSVTVS

SEQ ID NO: 2252 - protein, 117 aa, synthetic construct
LQLVESGGGLVQPGGSLRLSCAASGFTLDYYAIGWFRQAPGKEREGVSYISSSGGSTNYADSVKGRFTISRDNAKNTVYLQMNSLKPEDSAVYYCAAAGGYGNSSRYWGQGASVTVS

SEQ ID NO: 2253 - protein, 117 aa, synthetic construct
LQLVESGGGLVQPGGSLRLSCAASGFTLDYYAIGWFRQAPGKEREGVSYISSSGGSTNYADSVKGRFTISRDNAKNTVYLQMNSLKPEDSAVYYCAAAGGYGNSSRYWGQGTSVTAP

SEQ ID NO: 2254 - protein, 117 aa, synthetic construct
LQLVESGGGLVQPGGSLRLSCAASGFTLDYYAIGWFRQAPGKEREGVSYISSSGGSTNYADSVKGRFTISRDNAKNTVYLQMNSLKPEDSAVYYCAAAGGYGNSSRYWGQGTSVTVS

SEQ ID NO: 2255 - protein, 117 aa, synthetic construct
LQLVESGGGLVQPGGSLRLSCAASGFTLDYYAIGWFRQAPGKEREGVSYISSSGGSTNYADSVKGRFTISRDNAKNTVYLQMNSLKPEDSAVYYCAAAGGYRHSSRYWGQGTSVTVS

SEQ ID NO: 2256 - protein, 117 aa, synthetic construct
LQLVESGGGLVQPGGSLRLSCAASGFTLDYYAIGWFRQAPGKEREGVSYISSSGGSTNYADSVKGRFTISRDNAKNTVYLQMNSLKPEDSAVYYCAAAGGYRNSSRCWGQGTSVTVS

SEQ ID NO: 2257 - protein, 117 aa, synthetic construct
LQLVESGGGLVQPGGSLRLSCAASGFTLDYYAIGWFRQAPGKEREGVSYISSSGGSTNYADSVKGRFTISRDNAKNTVYLQMNSLKPEDSAVYYCAAAGGYRNSSRFWGQGTSVTVS

SEQ ID NO: 2258 - protein, 117 aa, synthetic construct
LQLVESGGGLVQPGGSLRLSCAASGFTLDYYAIGWFRQAPGKEREGVSYISSSGGSTNYADSVKGRFTISRDNAKNTVYLQMNSLKPEDSAVYYCAAAGGYRNSSRHWGQGTSVTVS

SEQ ID NO: 2259 - protein, 117 aa, synthetic construct
LQLVESGGGLVQPGGSLRLSCAASGFTLDYYAIGWFRQAPGKEREGVSYISSSGGSTNYADSVKGRFTISRDNAKNTVYLQMNSLKPEDSAVYYCAAAGGYRNSSRYWGPGTSVTVS

SEQ ID NO: 2260 - protein, 117 aa, synthetic construct
LQLVESGGGLVQPGGSLRLSCAASGFTLDYYAIGWFRQAPGKEREGVSYISSSGGSTNYADSVKGRFTISRDNAKNTVYLQMNSLKPEDSAVYYCAAAGGYRNSSRYWGQGASVTVS

SEQ ID NO: 2261 - protein, 117 aa, synthetic construct
LQLVESGGGLVQPGGSLRLSCAASGFTLDYYAIGWFRQAPGKEREGVSYISSSGGSTNYADSVKGRFTISRDNAKNTVYLQMNSLKPEDSAVYYCAAAGGYRNSSRYWGQGTSVTVS

SEQ ID NO: 2262 - protein, 117 aa, synthetic construct
LQLVESGGGLVQPGGSLRLSCAASGFTLDYYAIGWFRQAPGKEREGVSYISSSGGSTNYADSVKGRFTISRDNAKNTVYLQMNSLKPEDSAVYYCAAAGGYRNSSRYWGQGTTVTVS

SEQ ID NO: 2263 - protein, 117 aa, synthetic construct
LQLVESGGGLVQPGGSLRLSCAASGFTLDYYAIGWFRQAPGKEREGVSYISSSGGSTNYADSVKGRFTISRDNAKNTVYLQMNSLKPEDSAVYYCAAAGGYRNSSRYWGQVTSVTVS

SEQ ID NO: 2264 - protein, 117 aa, synthetic construct
LQLVESGGGLVQPGGSLRLSCAASGFTLDYYAIGWFRQAPGKEREGVSYISSSGGSTNYADSVKGRFTISRDNAKNTVYLQMNSLKPEDSAVYYCAAAGGYTNSSRYWGQGTSVTVS

SEQ ID NO: 2265 - protein, 117 aa, synthetic construct
LQLVESGGGLVQPGGSLRLSCAASGFTLDYYAIGWFRQAPGKEREGVSYISSSGGSTNYADSVKGRFTISRDNAKNTVYLQMNSLKPEDSGVYSCAAAGGYRNSSRYWGQGTSVTVS

SEQ ID NO: 2266 - protein, 117 aa, synthetic construct
LQLVESGGGLVQPGGSLRLSCAASGFTLDYYAIGWFRQAPGKEREGVSYISSSGGSTNYADSVKGRFTISRDNAKNTVYLQMNSLKPEDSGVYYCAAAGGYGNSSRYWGQGTSVTVS

SEQ ID NO: 2267 - protein, 117 aa, synthetic construct
LQLVESGGGLVQPGGSLRLSCAASGFTLDYYAIGWFRQAPGKEREGVSYISSSGGSTNYADSVKGRFTISRDNAKNTVYLQMNSLKPEDSSVYYCAAAGGYRNSSRYWGQGTSVTVS

SEQ ID NO: 2268 - protein, 117 aa, synthetic construct
LQLVESGGGLVQPGGSLRLSCAASGFTLDYYAIGWFRQAPGKEREGVSYISSSGGSTNYADSVKGRFTISRDNAKNTVYLQMNSLKPEDTAIYSCAAAGGYGNSSRYWGQGTSVTVS

SEQ ID NO: 2269 - protein, 117 aa, synthetic construct
LQLVESGGGLVQPGGSLRLSCAASGFTLDYYAIGWFRQAPGKEREGVSYISSSGGSTNYADSVKGRFTISRDNAKNTVYLQMNSLKPEDTAIYYCAAAGGYGNSSRYWGPGTSVTVS

SEQ ID NO: 2270 - protein, 117 aa, synthetic construct
LQLVESGGGLVQPGGSLRLSCAASGFTLDYYAIGWFRQAPGKEREGVSYISSSGGSTNYADSVKGRFTISRDNAKNTVYLQMNSLKPEDTAIYYCAAAGGYGNSSRYWGQGASVTVS

SEQ ID NO: 2271 - protein, 117 aa, synthetic construct
LQLVESGGGLVQPGGSLRLSCAASGFTLDYYAIGWFRQAPGKEREGVSYISSSGGSTNYADSVKGRFTISRDNAKNTVYLQMNSLKPEDTAIYYCAAAGGYGNSSRYWGQGTSVAVS

SEQ ID NO: 2272 - protein, 117 aa, synthetic construct
LQLVESGGGLVQPGGSLRLSCAASGFTLDYYAIGWFRQAPGKEREGVSYISSSGGSTNYADSVKGRFTISRDNAKNTVYLQMNSLKPEDTAIYYCAAAGGYGNSSRYWGQGTSVTVS

SEQ ID NO: 2273 - protein, 117 aa, synthetic construct
LQLVESGGGLVQPGGSLRLSCAASGFTLDYYAIGWFRQAPGKEREGVSYISSSGGSTNYADSVKGRFTISRDNAKNTVYLQMNSLKPEDTAIYYCAAAGGYRNSSRYWGQGTSVTVS

SEQ ID NO: 2274 - protein, 117 aa, synthetic construct
LQLVESGGGLVQPGGSLRLSCAASGFTLDYYAIGWFRQAPGKEREGVSYISSSGGSTNYADSVKGRFTISRDNAKNTVYLQMNSLKPEDTAIYYCAAAGGYTNSSRYWGQGTSVTVS

SEQ ID NO: 2275 - protein, 115 aa, synthetic construct
LQLVESGGGLVQPGGSLRLSCAASGFTLDYYAIGWFRQAPGKEREGVSYISSSGGSTNYADSVKGRFTISRDNAKNTVYLQMNSLKPEDTAMYYCASLWLRRLVCWGQGTLVTVS

SEQ ID NO: 2276 - protein, 117 aa, synthetic construct
LQLVESGGGLVQPGGSLRLSCAASGFTLDYYAIGWFRQAPGKEREGVSYISSSGGSTNYADSVKGRFTISRDNAKNTVYLQMNSLKPEDTAVYSCAAAGGYRNSSRCWGQGTSVTVS

SEQ ID NO: 2277 - protein, 117 aa, synthetic construct
LQLVESGGGLVQPGGSLRLSCAASGFTLDYYAIGWFRQAPGKEREGVSYISSSGGSTNYADSVKGRFTISRDNAKNTVYLQMNSLKPEDTAVYSCAAAGGYRNSSRFWGQGTSVTVS

SEQ ID NO: 2278 - protein, 117 aa, synthetic construct
LQLVESGGGLVQPGGSLRLSCAASGFTLDYYAIGWFRQAPGKEREGVSYISSSGGSTNYADSVKGRFTISRDNAKNTVYLQMNSLKPEDTAVYSCAAAGGYRNSSRYWGPGTSVTVS

SEQ ID NO: 2279 - protein, 117 aa, synthetic construct
LQLVESGGGLVQPGGSLRLSCAASGFTLDYYAIGWFRQAPGKEREGVSYISSSGGSTNYADSVKGRFTISRDNAKNTVYLQMNSLKPEDTAVYSCAAAGGYRNSSRYWGQGTSVTVS

SEQ ID NO: 2280 - protein, 117 aa, synthetic construct
LQLVESGGGLVQPGGSLRLSCAASGFTLDYYAIGWFRQAPGKEREGVSYISSSGGSTNYADSVKGRFTISRDNAKNTVYLQMNSLKPEDTAVYYCAAAGCYGNSSRYWGQGTSVTVS

SEQ ID NO: 2281 - protein, 117 aa, synthetic construct
LQLVESGGGLVQPGGSLRLSCAASGFTLDYYAIGWFRQAPGKEREGVSYISSSGGSTNYADSVKGRFTISRDNAKNTVYLQMNSLKPEDTAVYYCAAAGGYGNFSRYWGQGTSVTVS

SEQ ID NO: 2282 - protein, 117 aa, synthetic construct
LQLVESGGGLVQPGGSLRLSCAASGFTLDYYAIGWFRQAPGKEREGVSYISSSGGSTNYADSVKGRFTISRDNAKNTVYLQMNSLKPEDTAVYYCAAAGGYGNSPRYWGQGTSVTVS

SEQ ID NO: 2283 - protein, 117 aa, synthetic construct
LQLVESGGGLVQPGGSLRLSCAASGFTLDYYAIGWFRQAPGKEREGVSYISSSGGSTNYADSVKGRFTISRDNAKNTVYLQMNSLKPEDTAVYYCAAAGGYGNSSRCWGQGTSVTVS

SEQ ID NO: 2284 - protein, 117 aa, synthetic construct
LQLVESGGGLVQPGGSLRLSCAASGFTLDYYAIGWFRQAPGKEREGVSYISSSGGSTNYADSVKGRFTISRDNAKNTVYLQMNSLKPEDTAVYYCAAAGGYGNSSRFWGQGTSVTVS

SEQ ID NO: 2285 - protein, 117 aa, synthetic construct
LQLVESGGGLVQPGGSLRLSCAASGFTLDYYAIGWFRQAPGKEREGVSYISSSGGSTNYADSVKGRFTISRDNAKNTVYLQMNSLKPEDTAVYYCAAAGGYGNSSRHWGQGTSVTVS

SEQ ID NO: 2286 - protein, 117 aa, synthetic construct
LQLVESGGGLVQPGGSLRLSCAASGFTLDYYAIGWFRQAPGKEREGVSYISSSGGSTNYADSVKGRFTISRDNAKNTVYLQMNSLKPEDTAVYYCAAAGGYGNSSRYWGPGTSVTVS

SEQ ID NO: 2287 - protein, 117 aa, synthetic construct
LQLVESGGGLVQPGGSLRLSCAASGFTLDYYAIGWFRQAPGKEREGVSYISSSGGSTNYADSVKGRFTISRDNAKNTVYLQMNSLKPEDTAVYYCAAAGGYGNSSRYWGQGASVTVS

SEQ ID NO: 2288 - protein, 117 aa, synthetic construct
LQLVESGGGLVQPGGSLRLSCAASGFTLDYYAIGWFRQAPGKEREGVSYISSSGGSTNYADSVKGRFTISRDNAKNTVYLQMNSLKPEDTAVYYCAAAGGYGNSSRYWGQGTSVTSP

SEQ ID NO: 2289 - protein, 117 aa, synthetic construct
LQLVESGGGLVQPGGSLRLSCAASGFTLDYYAIGWFRQAPGKEREGVSYISSSGGSTNYADSVKGRFTISRDNAKNTVYLQMNSLKPEDTAVYYCAAAGGYGNSSRYWGQGTSVTVS

SEQ ID NO: 2290 - protein, 117 aa, synthetic construct
LQLVESGGGLVQPGGSLRLSCAASGFTLDYYAIGWFRQAPGKEREGVSYISSSGGSTNYADSVKGRFTISRDNAKNTVYLQMNSLKPEDTAVYYCAAAGGYGNSSRYWGQGTTVTVS

SEQ ID NO: 2291 - protein, 117 aa, synthetic construct
LQLVESGGGLVQPGGSLRLSCAASGFTLDYYAIGWFRQAPGKEREGVSYISSSGGSTNYADSVKGRFTISRDNAKNTVYLQMNSLKPEDTAVYYCAAAGGYPNSSRYWGQGTSVTVS

SEQ ID NO: 2292 - protein, 117 aa, synthetic construct
LQLVESGGGLVQPGGSLRLSCAASGFTLDYYAIGWFRQAPGKEREGVSYISSSGGSTNYADSVKGRFTISRDNAKNTVYLQMNSLKPEDTAVYYCAAAGGYRNSSRFWGQGTSVTVS

SEQ ID NO: 2293 - protein, 117 aa, synthetic construct
LQLVESGGGLVQPGGSLRLSCAASGFTLDYYAIGWFRQAPGKEREGVSYISSSGGSTNYADSVKGRFTISRDNAKNTVYLQMNSLKPEDTAVYYCAAAGGYRNSSRYWGQGASVTVS

SEQ ID NO: 2294 - protein, 117 aa, synthetic construct
LQLVESGGGLVQPGGSLRLSCAASGFTLDYYAIGWFRQAPGKEREGVSYISSSGGSTNYADSVKGRFTISRDNAKNTVYLQMNSLKPEDTAVYYCAAAGGYRNSSRYWGQGTSVTVS

SEQ ID NO: 2295 - protein, 117 aa, synthetic construct
LQLVESGGGLVQPGGSLRLSCAASGFTLDYYAIGWFRQAPGKEREGVSYISSSGGSTNYADSVKGRFTISRDNAKNTVYLQMNSLKPEDTAVYYCAAAGGYTNSPRYWGQGTSVTVS

SEQ ID NO: 2296 - protein, 117 aa, synthetic construct
LQLVESGGGLVQPGGSLRLSCAASGFTLDYYAIGWFRQAPGKEREGVSYISSSGGSTNYADSVKGRFTISRDNAKNTVYLQMNSLKPEDTAVYYCAAAGGYTNSSRCWGQGTSVTVS

SEQ ID NO: 2297 - protein, 117 aa, synthetic construct
LQLVESGGGLVQPGGSLRLSCAASGFTLDYYAIGWFRQAPGKEREGVSYISSSGGSTNYADSVKGRFTISRDNAKNTVYLQMNSLKPEDTAVYYCAAAGGYTNSSRYWGPGTSVTVS

SEQ ID NO: 2298 - protein, 117 aa, synthetic construct
LQLVESGGGLVQPGGSLRLSCAASGFTLDYYAIGWFRQAPGKEREGVSYISSSGGSTNYADSVKGRFTISRDNAKNTVYLQMNSLKPEDTAVYYCAAAGGYTNSSRYWGQGTSVTVS

SEQ ID NO: 2299 - protein, 111 aa, synthetic construct
LQLVESGGGLVQPGGSLRLSCAASGFTLDYYAIGWFRQAPGKEREGVSYISSSGGSTNYADSVKGRFTISRDNAKNTVYLQMNSLKPEDTAVYYCAADWPPGGQGTLVTVS

SEQ ID NO: 2300 - protein, 115 aa, synthetic construct
LQLVESGGGLVQPGGSLRLSCAASGFTLDYYAIGWFRQAPGKEREGVSYISSSGGSTNYADSVKGRFTISRDNAKNTVYLQMNSLKPEDTAVYYCASLWLRRLVCWGQGTLVTVS

SEQ ID NO: 2301 - protein, 111 aa, synthetic construct
LQLVESGGGLVQPGGSLRLSCAASGFTLDYYAIGWFRQAPGKEREGVSYISSSGGSTNYADSVKGRFTISRDNAKNTVYLQMNSLKPEDTGVYSCAADWPPGGQGTLVTVS

SEQ ID NO: 2302 - protein, 117 aa, synthetic construct
LQLVESGGGLVQPGGSLRLSCAASGFTLDYYAIGWFRQAPGKEREGVSYISSSGGSTNYADSVKGRFTISRDNAKNTVYLQMNSLKPEDTGVYYCAAAGGYGNSSRFWGQGTSVTVS

SEQ ID NO: 2303 - protein, 117 aa, synthetic construct
LQLVESGGGLVQPGGSLRLSCAASGFTLDYYAIGWFRQAPGKEREGVSYISSSGGSTNYADSVKGRFTISRDNAKNTVYLQMNSLKPEDTGVYYCAAAGGYGNSSRYWGPGTSVTVS

SEQ ID NO: 2304 - protein, 117 aa, synthetic construct
LQLVESGGGLVQPGGSLRLSCAASGFTLDYYAIGWFRQAPGKEREGVSYISSSGGSTNYADSVKGRFTISRDNAKNTVYLQMNSLKPEDTGVYYCAAAGGYGNSSRYWGQGASVTVS

SEQ ID NO: 2305 - protein, 117 aa, synthetic construct
LQLVESGGGLVQPGGSLRLSCAASGFTLDYYAIGWFRQAPGKEREGVSYISSSGGSTNYADSVKGRFTISRDNAKNTVYLQMNSLKPEDTGVYYCAAAGGYGNSSRYWGQGTSVTVS

SEQ ID NO: 2306 - protein, 117 aa, synthetic construct
LQLVESGGGLVQPGGSLRLSCAASGFTLDYYAIGWFRQAPGKEREGVSYISSSGGSTNYADSVKGRFTISRDNAKNTVYLQMNSLKPEDTGVYYCAAAGGYRNSSRYWGPGTSVTVS

SEQ ID NO: 2307 - protein, 117 aa, synthetic construct
LQLVESGGGLVQPGGSLRLSCAASGFTLDYYAIGWFRQAPGKEREGVSYISSSGGSTNYADSVKGRFTISRDNAKNTVYLQMNSLKPEDTGVYYCAAAGGYRNSSRYWGQGTSVTVS

SEQ ID NO: 2308 - protein, 117 aa, synthetic construct
LQLVESGGGLVQPGGSLRLSCAASGFTLDYYAIGWFRQAPGKEREGVSYISSSGGSTNYADSVKGRFTISRDNAKNTVYLQMNSLKPEDTGVYYCAAAGGYTNSSRYWGQGTSVTVS

SEQ ID NO: 2309 - protein, 117 aa, synthetic construct
LQLVESGGGLVQPGGSLRLSCAASGFTLDYYAIGWFRQAPGKEREGVSYISSSGGSTNYADSVKGRFTISRDNAKNTVYLQMNSPKPEDSAVYYCAAAGGYRNSSRYWGQGTSVTVS

SEQ ID NO: 2310 - protein, 117 aa, synthetic construct
LQLVESGGGLVQPGGSLRLSCAASGFTLDYYAIGWFRQAPGKEREGVSYISSSGGSTNYADSVKGRFTISRDNAKNTVYLQTNSLKPEDSAVYYCAAAGGYRNSSRYWGQGTSVTVS

SEQ ID NO: 2311 - protein, 117 aa, synthetic construct
LQLVESGGGLVQPGGSLRLSCAASGFTLDYYAIGWFRQAPGKEREGVSYISSSGGSTNYADSVKGRFTISRNNAKNTVYLQMHSLKPEDSAVYYCAAAGGYRNSSRYWGQGTSVTVS

SEQ ID NO: 2312 - protein, 117 aa, synthetic construct
LQLVESGGGLVQPGGSLRLSCAASGFTLDYYAIGWFRQAPGKEREGVSYISSSGGSTNYADSVKGRFTISRNNAKNTVYLQMHSLKPEDTAVYYCAAAGGYGNSSRYWGQGTSVTVS

SEQ ID NO: 2313 - protein, 117 aa, synthetic construct
LQLVESGGGLVQPGGSLRLSCAASGFTLDYYAIGWFRQAPGKEREGVSYISSSGGSTNYADSVKGRFTISRNNAKNTVYLQMHSLKPEDTAVYYCAAAGGYRNSSRYWGQGTSVTVS

SEQ ID NO: 2314 - protein, 117 aa, synthetic construct
LQLVESGGGLVQPGGSLRLSCAASGFTLDYYAIGWFRQAPGKEREGVSYISSSGGSTNYADSVKGRFTISRNNAKNTVYLQMHSLKPEDTAVYYCAAAGGYTNSSRYWGQGTSVTVS

SEQ ID NO: 2315 - protein, 117 aa, synthetic construct
LQLVESGGGLVQPGGSLRLSCAASGFTLDYYAIGWFRQAPGKEREGVSYISSSGGSTNYADSVKGRFTISRNNAKNTVYLQMNSLKPEDSAVYSCAAAGGYRNSSRYWGQGTSVTVS

SEQ ID NO: 2316 - protein, 117 aa, synthetic construct
LQLVESGGGLVQPGGSLRLSCAASGFTLDYYAIGWFRQAPGKEREGVSYISSSGGSTNYADSVKGRFTISRNNAKNTVYLQMNSLKPEDSAVYYCAAAGGYGNSSRYWGQGTSVTVS

SEQ ID NO: 2317 - protein, 117 aa, synthetic construct
LQLVESGGGLVQPGGSLRLSCAASGFTLDYYAIGWFRQAPGKEREGVSYISSSGGSTNYADSVKGRFTISRNNAKNTVYLQMNSLKPEDSAVYYCAAAGGYRNSSRYWGQGTSVTVS

SEQ ID NO: 2318 - protein, 117 aa, synthetic construct
LQLVESGGGLVQPGGSLRLSCAASGFTLDYYAIGWFRQAPGKEREGVSYISSSGGSTNYADSVKGRFTISRNNAKNTVYLQMNSLKPEDTAVYYCAAAGGYGNSSRYWGQGTSVTVS

SEQ ID NO: 2319 - protein, 117 aa, synthetic construct
LQLVESGGGLVQPGGSLRLSCAASGFTLDYYAIGWFRQAPGKEREGVSYISSSGGSTNYADSVKGRFTISRNNAKNTVYLQMNSLKPEDTAVYYCAAAGGYTNSSRYWGQGTSVTVS

SEQ ID NO: 2320 - protein, 117 aa, synthetic construct
LQLVESGGGLVQPGGSLRLSCAASGFTLDYYAIGWFRQAPGKEREGVSYISSSGGSTNYADSVKGRFTVSRDNAKNTVFLQMNSLKPEDTAVYYCAAAGGYGNSSRYWGQGTSVTVS

SEQ ID NO: 2321 - protein, 117 aa, synthetic construct
LQLVESGGGLVQPGGSLRLSCAASGFTLDYYAIGWFRQAPGKEREGVSYISSSGGSTNYADSVKGRFTVSRDNAKNTVSLQMNSLKPEDSAVYYCAAAGGYRNSSRYWGQGTSVTVS

SEQ ID NO: 2322 - protein, 117 aa, synthetic construct
LQLVESGGGLVQPGGSLRLSCAASGFTLDYYAIGWFRQAPGKEREGVSYISSSGGSTNYADSVKGRFTVSRDNAKNTVYLQMHNLKPEDTAVYYCAAAGGYRNSSRYWGQGTSVTVS

SEQ ID NO: 2323 - protein, 117 aa, synthetic construct
LQLVESGGGLVQPGGSLRLSCAASGFTLDYYAIGWFRQAPGKEREGVSYISSSGGSTNYADSVKGRFTVSRDNAKNTVYLQMNSLKPEDSAVYYCAAAGGYGNFSRYWGQGTSVTVS

SEQ ID NO: 2324 - protein, 117 aa, synthetic construct
LQLVESGGGLVQPGGSLRLSCAASGFTLDYYAIGWFRQAPGKEREGVSYISSSGGSTNYADSVKGRFTVSRDNAKNTVYLQMNSLKPEDSAVYYCAAAGGYGNSSRHWGQGTSVTVS

SEQ ID NO: 2325 - protein, 117 aa, synthetic construct
LQLVESGGGLVQPGGSLRLSCAASGFTLDYYAIGWFRQAPGKEREGVSYISSSGGSTNYADSVKGRFTVSRDNAKNTVYLQMNSLKPEDSAVYYCAAAGGYGNSSRYWGPGTSVTVS

SEQ ID NO: 2326 - protein, 117 aa, synthetic construct
LQLVESGGGLVQPGGSLRLSCAASGFTLDYYAIGWFRQAPGKEREGVSYISSSGGSTNYADSVKGRFTVSRDNAKNTVYLQMNSLKPEDSAVYYCAAAGGYGNSSRYWGQGTSVTVS

SEQ ID NO: 2327 - protein, 117 aa, synthetic construct
LQLVESGGGLVQPGGSLRLSCAASGFTLDYYAIGWFRQAPGKEREGVSYISSSGGSTNYADSVKGRFTVSRDNAKNTVYLQMNSLKPEDSAVYYCAAAGGYRNSSRCWGQGTSVTVS

SEQ ID NO: 2328 - protein, 117 aa, synthetic construct
LQLVESGGGLVQPGGSLRLSCAASGFTLDYYAIGWFRQAPGKEREGVSYISSSGGSTNYADSVKGRFTVSRDNAKNTVYLQMNSLKPEDSAVYYCAAAGGYRNSSRHWGQGTSVTVS

SEQ ID NO: 2329 - protein, 117 aa, synthetic construct
LQLVESGGGLVQPGGSLRLSCAASGFTLDYYAIGWFRQAPGKEREGVSYISSSGGSTNYADSVKGRFTVSRDNAKNTVYLQMNSLKPEDSAVYYCAAAGGYRNSSRYWGPGTSVTVS

SEQ ID NO: 2330 - protein, 117 aa, synthetic construct
LQLVESGGGLVQPGGSLRLSCAASGFTLDYYAIGWFRQAPGKEREGVSYISSSGGSTNYADSVKGRFTVSRDNAKNTVYLQMNSLKPEDSAVYYCAAAGGYRNSSRYWGQGASVTVS

SEQ ID NO: 2331 - protein, 117 aa, synthetic construct
LQLVESGGGLVQPGGSLRLSCAASGFTLDYYAIGWFRQAPGKEREGVSYISSSGGSTNYADSVKGRFTVSRDNAKNTVYLQMNSLKPEDSAVYYCAAAGGYRNSSRYWGQGTSVTVP

SEQ ID NO: 2332 - protein, 117 aa, synthetic construct
LQLVESGGGLVQPGGSLRLSCAASGFTLDYYAIGWFRQAPGKEREGVSYISSSGGSTNYADSVKGRFTVSRDNAKNTVYLQMNSLKPEDSAVYYCAAAGGYRNSSRYWGQGTSVTVS

SEQ ID NO: 2333 - protein, 117 aa, synthetic construct
LQLVESGGGLVQPGGSLRLSCAASGFTLDYYAIGWFRQAPGKEREGVSYISSSGGSTNYADSVKGRFTVSRDNAKNTVYLQMNSLKPEDSAVYYCAAAGGYRNSSRYWGQGTTVTVS

SEQ ID NO: 2334 - protein, 117 aa, synthetic construct
LQLVESGGGLVQPGGSLRLSCAASGFTLDYYAIGWFRQAPGKEREGVSYISSSGGSTNYADSVKGRFTVSRDNAKNTVYLQMNSLKPEDSAVYYCAAAGGYRNSSRYWGQVTSVTVS

SEQ ID NO: 2335 - protein, 117 aa, synthetic construct
LQLVESGGGLVQPGGSLRLSCAASGFTLDYYAIGWFRQAPGKEREGVSYISSSGGSTNYADSVKGRFTVSRDNAKNTVYLQMNSLKPEDSAVYYCAAAGGYRNSTRYWGQGTSVTVS

SEQ ID NO: 2336 - protein, 117 aa, synthetic construct
LQLVESGGGLVQPGGSLRLSCAASGFTLDYYAIGWFRQAPGKEREGVSYISSSGGSTNYADSVKGRFTVSRDNAKNTVYLQMNSLKPEDSAVYYCAAAGGYTNSSRYWGQGTSVTVS

SEQ ID NO: 2337 - protein, 117 aa, synthetic construct
LQLVESGGGLVQPGGSLRLSCAASGFTLDYYAIGWFRQAPGKEREGVSYISSSGGSTNYADSVKGRFTVSRDNAKNTVYLQMNSLKPEDTAIYYCAAAGGYGNSSRYWGQGTSVTVS

SEQ ID NO: 2338 - protein, 117 aa, synthetic construct
LQLVESGGGLVQPGGSLRLSCAASGFTLDYYAIGWFRQAPGKEREGVSYISSSGGSTNYADSVKGRFTVSRDNAKNTVYLQMNSLKPEDTAVYYCAAAGGYGNSSRYWGQGTSVTVS

SEQ ID NO: 2339 - protein, 117 aa, synthetic construct
LQLVESGGGLVQPGGSLRLSCAASGFTLDYYAIGWFRQAPGKEREGVSYISSSGGSTNYADSVKGRFTVSRDNAKNTVYLQMNSLKPEDTAVYYCAAAGGYGNSSRYWGQGTTVTVS

SEQ ID NO: 2340 - protein, 117 aa, synthetic construct
LQLVESGGGLVQPGGSLRLSCAASGFTLDYYAIGWFRQAPGKEREGVSYISSSGGSTNYADSVKGRFTVSRDNAKNTVYLQMNSLKPEDTAVYYCAAAGGYRNSSRYWGQGTSVTVS

SEQ ID NO: 2341 - protein, 117 aa, synthetic construct
LQLVESGGGLVQPGGSLRLSCAASGFTLDYYAIGWFRQAPGKEREGVSYISSSGGSTNYADSVKGRFTVSRDNAKNTVYLQMNSLKPEDTAVYYCAAAGGYTNSSRYWGPGTSVTVS

SEQ ID NO: 2342 - protein, 117 aa, synthetic construct
LQLVESGGGLVQPGGSLRLSCAASGFTLDYYAIGWFRQAPGKEREGVSYISSSGGSTNYADSVKGRFTVSRDNAKNTVYLQMNSLKPEDTAVYYCAAAGGYTNSSRYWGQGTSVTVS

SEQ ID NO: 2343 - protein, 117 aa, synthetic construct
LQLVESGGGLVQPGGSLRLSCAASGFTLDYYAIGWFRQAPGKEREGVSYISSSGGSTNYADSVKGRFTVSRDNAKNTVYLQMNSLKPEDTGVYYCAAAGGYRNSSRYWGQGTSVTVS

SEQ ID NO: 2344 - protein, 117 aa, synthetic construct
LQLVESGGGLVQPGGSLRLSCAASGFTLDYYAIGWFRQAPGKEREGVSYISSSGGSTNYADSVKGRFTVSRDNAKNTVYLQMNSLKPEDTGVYYCAAAGGYTNSSRYWGQGTSVTVS

SEQ ID NO: 2345 - protein, 117 aa, synthetic construct
LQLVESGGGLVQPGGSLRLSCAASGFTLDYYAIGWFRQAPGKEREGVSYISSSGGSTNYADTVKGRFTISRDNAKNTVYLQMNSLKPEDSAVYYCAAAGGYGNSSRYWGQGTSVTVS

SEQ ID NO: 2346 - protein, 117 aa, synthetic construct
LQLVESGGGLVQPGGSLRLSCAASGFTLDYYAIGWFRQAPGKEREGVSYISSSGGSTNYADTVKGRFTISRDNAKNTVYLQMNSLKPEDSAVYYCAAAGGYRNSSRYWGQGTSVTVS

SEQ ID NO: 2347 - protein, 117 aa, synthetic construct
LQLVESGGGLVQPGGSLRLSCAASGFTLDYYAIGWFRQAPGKEREGVSYISSSGGSTNYADTVKGRFTISRDNAKNTVYLQMNSLKPEDTAIYYCAAAGGYGNSSRYWGQGTSVTVS

SEQ ID NO: 2348 - protein, 117 aa, synthetic construct
LQLVESGGGLVQPGGSLRLSCAASGFTLDYYAIGWFRQAPGKEREGVSYISSSGGSTNYADTVKGRFTISRDNAKNTVYLQMNSLKPEDTAVYYCAAAGGYGNSSRYWGQGTSVTVS

SEQ ID NO: 2349 - protein, 117 aa, synthetic construct
LQLVESGGGLVQPGGSLRLSCAASGFTLDYYAIGWFRQAPGKEREGVSYISSSGGSTNYAESVKGRFTISRDNAKNTVFLQMNSLKPEDSAVYYCAAAGGYGNSSRYWGQGTSVTVS

SEQ ID NO: 2350 - protein, 117 aa, synthetic construct
LQLVESGGGLVQPGGSLRLSCAASGFTLDYYAIGWFRQAPGKEREGVSYISSSGGSTNYAESVKGRFTISRDNAKNTVFLQMNSLKPEDSAVYYCAAAGGYRNSSRYWGQGTSVTVS

SEQ ID NO: 2351 - protein, 117 aa, synthetic construct
LQLVESGGGLVQPGGSLRLSCAASGFTLDYYAIGWFRQAPGKEREGVSYISSSGGSTNYAESVKGRFTISRDNAKNTVFLQMNSLKPEDTAVYYCAAAGGYGNSSRYWGQGTSVTVS

SEQ ID NO: 2352 - protein, 117 aa, synthetic construct
LQLVESGGGLVQPGGSLRLSCAASGFTLDYYAIGWFRQAPGKEREGVSYISSSGGSTNYAESVKGRFTISRDNAKNTVYLQMNSLKPEDSAVYYCAAAGGYGNSSRYWGQGTSVTVS

SEQ ID NO: 2353 - protein, 117 aa, synthetic construct
LQLVESGGGLVQPGGSLRLSCAASGFTLDYYAIGWFRQAPGKEREGVSYISSSGGSTNYAESVKGRFTISRDNAKNTVYLQMNSLKPEDSAVYYCAAAGGYRNSSRYWGQGTSVTVS

SEQ ID NO: 2354 - protein, 117 aa, synthetic construct
LQLVESGGGLVQPGGSLRLSCAASGFTLDYYAIGWFRQAPGKEREGVSYISSSGGSTNYAESVKGRFTISRDNAKNTVYLQMNSLKPEDSAVYYCAAAGGYTNSSRYWGQGTSVTVS

SEQ ID NO: 2355 - protein, 117 aa, synthetic construct
LQLVESGGGLVQPGGSLRLSCAASGFTLDYYAIGWFRQAPGKEREGVSYISSSGGSTNYAESVKGRFTISRDNAKNTVYLQMNSLKPEDTAIYYCAAAGGYGNSSRYWGQGTSVTVS

SEQ ID NO: 2356 - protein, 117 aa, synthetic construct
LQLVESGGGLVQPGGSLRLSCAASGFTLDYYAIGWFRQAPGKEREGVSYISSSGGSTNYAESVKGRFTISRDNAKNTVYLQMNSLKPEDTAVYYCAAAGGYGNSSRYWGQGTSVTVS

SEQ ID NO: 2357 - protein, 117 aa, synthetic construct
LQLVESGGGLVQPGGSLRLSCAASGFTLDYYAIGWFRQAPGKEREGVSYISSSGGSTNYAESVKGRFTISRDNAKNTVYLQMNSLKPEDTAVYYCAAAGGYRNSSRYWGQGTSVTVS

SEQ ID NO: 2358 - protein, 117 aa, synthetic construct
LQLVESGGGLVQPGGSLRLSCAASGFTLDYYAIGWFRQAPGKEREGVSYISSSGGSTNYAESVKGRFTISRDNAKNTVYLQMNSLKPEDTAVYYCAAAGGYTNSSRYWGQGTSVTVS

SEQ ID NO: 2359 - protein, 117 aa, synthetic construct
LQLVESGGGLVQPGGSLRLSCAASGFTLDYYAIGWFRQAPGKEREGVSYISSSGGSTNYAESVKGRFTISRDNAKNTVYLQMNSLKPEDTGVYYCAAAGGYGNSSRYWGQGTSVTVS

SEQ ID NO: 2360 - protein, 117 aa, synthetic construct
LQLVESGGGLVQPGGSLRLSCAASGFTLDYYAIGWFRQAPGKEREGVSYISSSGGSTNYAESVKGRFTVSRDNAKNTVYLQMNSLKPEDSAVYYCAAAGGYRNSSRYWGQGTSVTVS

SEQ ID NO: 2361 - protein, 117 aa, synthetic construct
LQLVESGGGLVQPGGSLRLSCAASGFTLDYYAIGWFRQAPGKEREGVSYISSSGGSTNYAESVKGRFTVSRDNAKNTVYLQMNSLKPEDTAVYYCAAAGGYTNSSRYWGQGTSVTVS

SEQ ID NO: 2362 - protein, 117 aa, synthetic construct
LQLVESGGGLVQPGGSLRLSCAASGFTLDYYAIGWFRQAPGKEREGVSYTSSSGGSTNYADSVKGRFTISRDNAKNTVYLQMNSLKPEDTAVYYCAAAGGYGNSSRYWGQGTSVTVS

SEQ ID NO: 2363 - protein, 117 aa, synthetic construct
LQLVESGGGLVQPGGSLRLSCAASGFTLDYYAIGWSRQAPGKEREGVSCISSSGGSTNYADSVKGRFTISRDNAKNTVYLQMNSLKPEDSAVYSCAAAGGYGNSSRYWGQGTSVTVS

SEQ ID NO: 2364 - protein, 117 aa, synthetic construct
LQLVESGGGLVQPGGSLRLSCAASGFTLDYYAIGWSRQAPGKEREGVSCISSSGGSTNYADSVKGRFTISRDNAKNTVYLQMNSLKPEDSAVYSCAAAGGYRNSSRFWGQGTSVTVS

SEQ ID NO: 2365 - protein, 117 aa, synthetic construct
LQLVESGGGLVQPGGSLRLSCAASGFTLDYYAIGWSRQAPGKEREGVSCISSSGGSTNYADSVKGRFTISRDNAKNTVYLQMNSLKPEDSAVYSCAAAGGYRNSSRYWGQGTSVTVS

SEQ ID NO: 2366 - protein, 117 aa, synthetic construct
LQLVESGGGLVQPGGSLRLSCAASGFTLDYYAIGWSRQAPGKEREGVSCISSSGGSTNYADSVKGRFTISRDNAKNTVYLQMNSLKPEDSAVYYCAAAGGYGNSSRYWGQGTSVTVS

SEQ ID NO: 2367 - protein, 117 aa, synthetic construct
LQLVESGGGLVQPGGSLRLSCAASGFTLDYYAIGWSRQAPGKEREGVSCISSSGGSTNYADSVKGRFTISRDNAKNTVYLQMNSLKPEDSAVYYCAAAGGYRNSSRYWGQGTSVTVS

SEQ ID NO: 2368 - protein, 117 aa, synthetic construct
LQLVESGGGLVQPGGSLRLSCAASGFTLDYYAIGWSRQAPGKEREGVSCISSSGGSTNYADSVKGRFTISRDNAKNTVYLQMNSLKPEDTAIYYCAAAGGYGNSSRYWGQGTSVTVS

SEQ ID NO: 2369 - protein, 117 aa, synthetic construct
LQLVESGGGLVQPGGSLRLSCAASGFTLDYYAIGWSRQAPGKEREGVSCISSSGGSTNYADSVKGRFTISRDNAKNTVYLQMNSLKPEDTAVYSCAAAGGYGNSSRYWGQGTSVTVS

SEQ ID NO: 2370 - protein, 117 aa, synthetic construct
LQLVESGGGLVQPGGSLRLSCAASGFTLDYYAIGWSRQAPGKEREGVSCISSSGGSTNYADSVKGRFTISRDNAKNTVYLQMNSLKPEDTAVYYCAAAGGYGNSSRYWGQGTSVTVS

SEQ ID NO: 2371 - protein, 117 aa, synthetic construct
LQLVESGGGLVQPGGSLRLSCAASGFTLDYYAIGWSRQAPGKEREGVSCISSSGGSTNYADSVKGRFTISRDNAKNTVYLQMNSLKPEDTAVYYCAAAGGYRNSSRYWGQGTSVTVS

SEQ ID NO: 2372 - protein, 117 aa, synthetic construct
LQLVESGGGLVQPGGSLRLSCAASGFTLDYYAIGWSRQAPGKEREGVSCISSSGGSTNYADSVKGRFTVSRDNAKNTVYLQMNSLKPEDSAVYYCAAAGGYRNSSRYWGQGTSVTVS

SEQ ID NO: 2373 - protein, 117 aa, synthetic construct
LQLVESGGGLVQPGGSLRLSCAASGFTLDYYAIGWSRQAPGKEREGVSYISSSGGSTNYADSVKGRFTISRDNAKNTVYLQMNSLKPEDSAVYSCAAAGGYGNSSRYWGQGTSVTVS

SEQ ID NO: 2374 - protein, 117 aa, synthetic construct
LQLVESGGGLVQPGGSLRLSCAASGFTLDYYAIGWSRQAPGKEREGVSYISSSGGSTNYADSVKGRFTISRDNAKNTVYLQMNSLKPEDSAVYSCAAAGGYRNSSRYWGQGTSVTVS

SEQ ID NO: 2375 - protein, 117 aa, synthetic construct
LQLVESGGGLVQPGGSLRLSCAASGFTLDYYAIGWSRQAPGKEREGVSYISSSGGSTNYADSVKGRFTISRDNAKNTVYLQMNSLKPEDSAVYYCAAAGGYGNSSRYWGQGTSVTVS

SEQ ID NO: 2376 - protein, 117 aa, synthetic construct
LQLVESGGGLVQPGGSLRLSCAASGFTLDYYAIGWSRQAPGKEREGVSYISSSGGSTNYADSVKGRFTISRDNAKNTVYLQMNSLKPEDSAVYYCAAAGGYRNSSRYWGQGTSVTVS

SEQ ID NO: 2377 - protein, 117 aa, synthetic construct
LQLVESGGGLVQPGGSLRLSCAASGFTLDYYAIGWSRQAPGKEREGVSYISSSGGSTNYADSVKGRFTISRDNAKNTVYLQMNSLKPEDTAVYSCAAAGGYGNSSRYWGQGTSVTVS

SEQ ID NO: 2378 - protein, 117 aa, synthetic construct
LQLVESGGGLVQPGGSLRLSCAASGFTLDYYAIGWSRQAPGKEREGVSYISSSGGSTNYADSVKGRFTISRDNAKNTVYLQMNSLKPEDTAVYSCAAAGGYRNSSRYWGQGTSVTVS

SEQ ID NO: 2379 - protein, 117 aa, synthetic construct
LQLVESGGGLVQPGGSLRLSCAASGFTLDYYAIGWSRQAPGKEREGVSYISSSGGSTNYADSVKGRFTISRDNAKNTVYLQMNSLKPEDTAVYYCAAAGGYGNSSRYWGQGTSVTVS

SEQ ID NO: 2380 - protein, 117 aa, synthetic construct
LQLVESGGGLVQPGGSLRLSCAASGFTLDYYAIGWSRQAPGKEREGVSYISSSGGSTNYADSVKGRFTISRDNAKNTVYLQMNSLKPEDTAVYYCAAAGGYTNSSRYWGQGTSVTVS

SEQ ID NO: 2381 - protein, 117 aa, synthetic construct
LQLVESGGGLVQPGGSLRLSCAASGFTLDYYAIGWSRQAPGKEREGVSYISSSGGSTNYADSVKGRFTVSRDNAKNTVYLQMNSLKPEDSAVYYCAAAGGYRNSSRYWGQGTSVTVS

SEQ ID NO: 2382 - protein, 117 aa, synthetic construct
LQLVESGGGLVQPGGSLRLSCAASGFTLDYYATGWFRQAPGKEREGVSYISSSGGSTNYADSVKGRFTISRDNAKNTVYLQMNSLKPEDSAVYYCAAAGGYRNSSRYWGQGTSVTVS

SEQ ID NO: 2383 - protein, 117 aa, synthetic construct
LQLVESGGGLVQPGGSLRLSCAASGFTLDYYAVGWFRQAPGKEREGVSYISSSGGSTNYADSVKGRFTISRDNAKNTVYLQMNSLKPEDSAVYYCAAAGGYRNSSRYWGQGTSVTVS

SEQ ID NO: 2384 - protein, 117 aa, synthetic construct
LQLVESGGGLVQPGGSLRLSCAASGVTLDYYAIGWFRQAPGKEREGVSYISSSGGSTNYADSVKGRFTISRDNAKNTVYLQMNSLKPEDSAVYYCAAAGGYGNSSRYWGQGTSVTVS

SEQ ID NO: 2385 - protein, 117 aa, synthetic construct
LQLVESGGGLVQPGGSLRLSCAASGVTLDYYAIGWFRQAPGKEREGVSYISSSGGSTNYADSVKGRFTISRDNAKNTVYLQMNSLKPEDSAVYYCAAAGGYRNSSRYWGQGTSVTVS

SEQ ID NO: 2386 - protein, 117 aa, synthetic construct
LQLVESGGGLVQPGGSLRLSCAASGVTLDYYAIGWFRQAPGKEREGVSYISSSGGSTNYADSVKGRFTISRDNAKNTVYLQMNSLKPEDTAIYYCAAAGGYGNSSRYWGQGTSVTVS

SEQ ID NO: 2387 - protein, 117 aa, synthetic construct
LQLVESGGGLVQPGGSLRLSCAASGVTLDYYAIGWFRQAPGKEREGVSYISSSGGSTNYADSVKGRFTISRDNAKNTVYLQMNSLKPEDTAVYYCAAAGGYGNSSRYWGQGTSVTVS

SEQ ID NO: 2388 - protein, 117 aa, synthetic construct
LQLVESGGGLVQPGGSLRLSCAASGVTLDYYAIGWFRQAPGKEREGVSYISSSGGSTNYADSVKGRFTISRDNAKNTVYLQMNSLKPEDTAVYYCAAAGGYRNSSRYWGQGTSVTVS

SEQ ID NO: 2389 - protein, 117 aa, synthetic construct
LQLVESGGGLVQPGGSLRLSCAASGVTLDYYAIGWFRQAPGKEREGVSYISSSGGSTNYADSVKGRFTISRDNAKNTVYLQMNSLKPEDTAVYYCAAAGGYTNSSRYWGQGTSVTVS

SEQ ID NO: 2390 - protein, 117 aa, synthetic construct
LQLVESGGGLVQPGGSLRLSCAASGVTLDYYAIGWFRQAPGKEREGVSYISSSGGSTNYADSVKGRFTISRDNAKNTVYLQMNSLKPEDTGVYYCAAAGGYGNSSRYWGQGTSVTVS

SEQ ID NO: 2391 - protein, 117 aa, synthetic construct
LQLVESGGGLVQPGGSLRLSCAASGVTLDYYAIGWFRQAPGKEREGVSYISSSGGSTNYADSVKGRFTVSRDNAKNTVYLQMNSLKPEDSAVYYCAAAGGYRNSSRYWGQGTSVTVS

SEQ ID NO: 2392 - protein, 117 aa, synthetic construct
LQLVESGGGLVQPGGSLRLSCAASGVTLDYYAIGWFRQAPGKEREGVSYISSSGGSTNYADSVKGRFTVSRDNAKNTVYLQMNSLKPEDTAVYYCAAAGGYTNSSRYWGQGTSVTVS

SEQ ID NO: 2393 - protein, 117 aa, synthetic construct
LQLVESGGGLVQPGGSLRLSCAASGVTLDYYAIGWSRQAPGKEREGVSCISSSGGSTNYADSVKGRFTISRDNAKNTVYLQMNSLKPEDSAVYYCAAAGGYRNSSRYWGQGTSVTVS

SEQ ID NO: 2394 - protein, 117 aa, synthetic construct
LQLVESGGGLVQPGGSLRLSCASSGFTLDYYAIGWFRQAPGKEREGVSYISSSGGSTNYADSVKGRFTISRDNAKNTVYLQMNSLKPEDSAVYYCAAAGGYRNSSRYWGQGTSVTVS

SEQ ID NO: 2395 - protein, 117 aa, synthetic construct
LQLVESGGGLVQPGGSLRLSCTASGFTLDYYAIGWFRQAPGKEREGVSYISSSGGSTNYADSVKGRFTVSRDNAKNTVYLQMNSLKPEDSAVYYCAAAGGYRNSSRYWGQGTSVTVS

SEQ ID NO: 2396 - protein, 115 aa, synthetic construct
LVESGGGLVQPGGSLRLSCAASGFTLDYYAIGWFRQAPGKEREGVSYISSSGGSTNYADSVKGRFTISRDNAKNTVYLQMNSLKPEDSAVYYCAAAGGYGNSSRYWGQGTSVTVS

SEQ ID NO: 2397 - protein, 115 aa, synthetic construct
LVESGGGLVQPGGSLRLSCAASGFTLDYYAIGWFRQAPGKEREGVSYISSSGGSTNYADSVKGRFTISRDNAKNTVYLQMNSLKPEDSAVYYCAAAGGYRNSSRYWGQGTSVTVS

SEQ ID NO: 2398 - protein, 115 aa, synthetic construct
LVESGGGLVQPGGSLRLSCAASGFTLDYYAIGWFRQAPGKEREGVSYISSSGGSTNYADSVKGRFTVSRDNAKNTVYLQMNSLKPEDSAVYYCAAAGGYGNSSRYWGQGTSVTVS

SEQ ID NO: 2399 - protein, 116 aa, synthetic construct
QLVESGGGLVQPGGSLRLSCAASGFSLDYYAIGWFRQAPGKEREGVSYISSSGGSTNYADSVKGRFTISRDNAKNTVYLQMNSLKPEDSAVYYCAAAGGYGNSSRYWGQGTSVTVS

SEQ ID NO: 2400 - protein, 116 aa, synthetic construct
QLVESGGGLVQPGGSLRLSCAASGFSLDYYAIGWFRQAPGKEREGVSYISSSGGSTNYADSVKGRFTISRDNAKNTVYLQMNSLKPEDSAVYYCAAAGGYRNSSRYWGQGTSVTVS

SEQ ID NO: 2401 - protein, 116 aa, synthetic construct
QLVESGGGLVQPGGSLRLSCAASGFSLDYYAIGWFRQAPGKEREGVSYISSSGGSTNYADSVKGRFTISRDNAKNTVYLQMNSLKPEDTAIYYCAAAGGYGNSSRYWGQGTSVTVS

SEQ ID NO: 2402 - protein, 116 aa, synthetic construct
QLVESGGGLVQPGGSLRLSCAASGFSLDYYAIGWFRQAPGKEREGVSYISSSGGSTNYADSVKGRFTISRDNAKNTVYLQMNSLKPEDTAVYSCAAAGGYRNSSRYWGQGTSVTVS

SEQ ID NO: 2403 - protein, 116 aa, synthetic construct
QLVESGGGLVQPGGSLRLSCAASGFSLDYYAIGWFRQAPGKEREGVSYISSSGGSTNYADSVKGRFTISRDNAKNTVYLQMNSLKPEDTAVYYCAAAGGYGNSSRYWGQGTSVTVS

SEQ ID NO: 2404 - protein, 116 aa, synthetic construct
QLVESGGGLVQPGGSLRLSCAASGFSLDYYAIGWFRQAPGKEREGVSYISSSGGSTNYADSVKGRFTISRDNAKNTVYLQMNSLKPEDTAVYYCAAAGGYRNSSRYWGQGTSVTVS

SEQ ID NO: 2405 - protein, 116 aa, synthetic construct
QLVESGGGLVQPGGSLRLSCAASGFSLDYYAIGWFRQAPGKEREGVSYISSSGGSTNYADSVKGRFTISRDNAKNTVYLQMNSLKPEDTAVYYCAAAGGYTNSSRYWGQGTSVTVS

SEQ ID NO: 2406 - protein, 116 aa, synthetic construct
QLVESGGGLVQPGGSLRLSCAASGFSLDYYAIGWFRQAPGKEREGVSYISSSGGSTNYADSVKGRFTISRDNAKNTVYLQMNSLKPEDTGVYYCAAAGGYRNSSRYWGQGTSVTVS

SEQ ID NO: 2407 - protein, 116 aa, synthetic construct
QLVESGGGLVQPGGSLRLSCAASGFSLDYYAIGWFRQAPGKEREGVSYISSSGGSTNYADSVKGRFTISRDNAKNTVYLQMNSLKPEDTGVYYCAAAGGYTNSSRYWGQGTSVTVS

SEQ ID NO: 2408 - protein, 116 aa, synthetic construct
QLVESGGGLVQPGGSLRLSCAASGFSLDYYAIGWFRQAPGKEREGVSYISSSGGSTNYADSVKGRFTVSRDNAKNTVYLQMNSLKPEDSAVYYCAAAGGYRNSSRYWGQGTSVTVS

SEQ ID NO: 2409 - protein, 116 aa, synthetic construct
QLVESGGGLVQPGGSLRLSCAASGFSLDYYAIGWFRQAPGKEREGVSYISSSGGSTNYADSVKGRFTVSRDNAKNTVYLQMNSLKPEDTAVYYCAAAGGYGNSSRYWGQGTSVTVS

SEQ ID NO: 2410 - protein, 116 aa, synthetic construct
QLVESGGGLVQPGGSLRLSCAASGFSLDYYAIGWFRQAPGKEREGVSYISSSGGSTNYADSVKGRFTVSRDNAKNTVYLQMNSLKPEDTAVYYCAAAGGYRNSSRYWGQGTSVTVS

SEQ ID NO: 2411 - protein, 116 aa, synthetic construct
QLVESGGGLVQPGGSLRLSCAASGFSLDYYAIGWFRQAPGKEREGVSYISSSGGSTNYADSVKGRFTVSRDNAKNTVYLQMNSLKPEDTAVYYCAAAGGYTNSSRYWGQGTSVTVS

SEQ ID NO: 2412 - protein, 114 aa, synthetic construct
VESGGGLVQPGGSLRLSCAASGFTLDYYAIGWFRQAPGKEREGVSYISSSGGSTNYADSVKGRFTISRDNAKNTVYLQMNSLKPEDTAVYYCAAAGGYGNSSRYWGQGTSVTVS

SEQ ID NO: 2413 - protein, 114 aa, synthetic construct
VESGGGLVQPGGSLRLSCAASGFTLDYYAIGWFRQAPGKEREGVSYISSSGGSTNYADSVKGRFTVSRDNAKNTVYLQMNSLKPEDSAVYYCAAAGGYRNSSRYWGQGTSVTVS

SEQ ID NO: 2414 - protein, 117 aa, synthetic construct
VQLVESGGGLVQPGGSLRLSCAASGFTLDYYAIGWFRQAPGKEREGVSYISSSGGSTNYADSVKGRFTVSRDNAKNTVYLQMNSLKPEDSAVYYCAAAGGYRNSSRYWGQGTSVTVS

SEQ ID NO: 2415 - protein, 8 aa, synthetic construct
GCTLDYYA

SEQ ID NO: 2416 - protein, 8 aa, synthetic construct
GFTLDSYA

SEQ ID NO: 2417 - protein, 8 aa, synthetic construct
GVTLDYYA

SEQ ID NO: 2418 - protein, 8 aa, synthetic construct
GFSLDYYA

SEQ ID NO: 2419 - protein, 8 aa, synthetic construct
ICSSGGST

SEQ ID NO: 2420 - protein, 8 aa, synthetic construct
ISSSGGSS

SEQ ID NO: 2421 - protein, 8 aa, synthetic construct
TSSSGGST

SEQ ID NO: 2422 - protein, 12 aa, synthetic construct
AAAGGYRNSSRY

SEQ ID NO: 2423 - protein, 12 aa, synthetic construct
AAAGGYTNSSRY

SEQ ID NO: 2424 - protein, 12 aa, synthetic construct
AAAGGYGNFSRY

SEQ ID NO: 2425 - protein, 12 aa, synthetic construct
AAAGGYGNSPRY

SEQ ID NO: 2426 - protein, 12 aa, synthetic construct
AAAGGYGNSSRH

SEQ ID NO: 2427 - protein, 12 aa, synthetic construct
AAAGGYRHSSRY

SEQ ID NO: 2428 - protein, 12 aa, synthetic construct
AAAGGYRNSSRC

SEQ ID NO: 2429 - protein, 12 aa, synthetic construct
AAAGGYRNSSRF

SEQ ID NO: 2430 - protein, 12 aa, synthetic construct
AAAGGYRNSSRH

SEQ ID NO: 2431 - protein, 10 aa, synthetic construct
ASLWLRRLVC

SEQ ID NO: 2432 - protein, 12 aa, synthetic construct
AAAGCYGNSSRY

SEQ ID NO: 2433 - protein, 12 aa, synthetic construct
AAAGGYGNSSRC

SEQ ID NO: 2434 - protein, 12 aa, synthetic construct
AAAGGYGNSSRF

SEQ ID NO: 2435 - protein, 12 aa, synthetic construct
AAAGGYPNSSRY

SEQ ID NO: 2436 - protein, 12 aa, synthetic construct
AAAGGYTNSPRY

SEQ ID NO: 2437 - protein, 12 aa, synthetic construct
AAAGGYTNSSRC

SEQ ID NO: 2438 - protein, 12 aa, synthetic construct
AAAGGYRNSTRY

SEQ ID NO: 2439 - protein, 111 aa, synthetic construct
EVQLVESGGGSVEAGGSLRLSCTASGFTFDDSDMGWYRQAPGNECELVSTIFSDGGTYYADSVKGRFTISQDNAKNTVYLQMNSLKPEDTAVYYCAADWPPGGQGTLVTVS

SEQ ID NO: 2440 - protein, 111 aa, synthetic construct
EVQLVESGGGSVEAGGSLRLSCTASGFTFDDSDMGWYRQAPGNERELVATIFSDGGTYYADSVKGRFTISQDNAKNTVYLQMNSLKPEDTAVYYCAADWPPGGQGTLVTVS

SEQ ID NO: 2441 - protein, 111 aa, synthetic construct
EVQLVESGGGSVEAGGSLRLSCTASGFTFDDSDMGWYRQAPGNERELVATIRSDGSAYYADSVKGRFTISQDNAKNTVYLQMNSLKPEDTAVYYCAADWPPGGQGTLVTVS

SEQ ID NO: 2442 - protein, 111 aa, synthetic construct
EVQLVESGGGSVEAGGSLRLSCTASGFTFDDSDMGWYRQAPGNERELVATIRSDGSTYYADSVKGRFTISQDNAKNTVYLQMNSLKPEDTAVYYCAADWPPGGQGTLVTVS

SEQ ID NO: 2443 - protein, 111 aa, synthetic construct
EVQLVESGGGSVEAGGSLRLSCTASGFTFDDSDMGWYRQAPGNERELVSTIFSDGGTYYADSVKGRFSISQDNAKNTVYLQMNSLKPEDTAVYYCAADWPPGGQGTLVTVS

SEQ ID NO: 2444 - protein, 111 aa, synthetic construct
EVQLVESGGGSVEAGGSLRLSCTASGFTFDDSDMGWYRQAPGNERELVSTIFSDGGTYYADSVKGRFTISQDNAKNTIYLQMNSLKPEDTAMYYCAADWPPGGQGTLVTVS

SEQ ID NO: 2445 - protein, 111 aa, synthetic construct
EVQLVESGGGSVEAGGSLRLSCTASGFTFDDSDMGWYRQAPGNERELVSTIFSDGGTYYADSVKGRFTISQDNAKNTIYLQMNSLKPEDTAVYYCAADWPPGGQGTLVTVS

SEQ ID NO: 2446 - protein, 111 aa, synthetic construct
EVQLVESGGGSVEAGGSLRLSCTASGFTFDDSDMGWYRQAPGNERELVSTIFSDGGTYYADSVKGRFTISQDNAKNTVYLQMNSLKPEDTAVYYCAADWPPGGQGTLVTVS

SEQ ID NO: 2447 - protein, 111 aa, synthetic construct
EVQLVESGGGSVEAGGSLRLSCTASGFTFDDSDMGWYRQAPGNERELVSTIFSDGGTYYVDSVKGRFTISQDNAKNTVYLQMNSLKPEDTAVYYCAADWPPGGQGTLVTVS

SEQ ID NO: 2448 - protein, 111 aa, synthetic construct
EVQLVESGGGSVEAGGSLRLSCTASGFTFDDSDMGWYRQAPGNERELVSTIRSDGGTYYADSVKGRFTISQDNAKNTVYLQMNSLKPEDTAVYYCAADWPPGGQGTLVTVS

SEQ ID NO: 2449 - protein, 111 aa, synthetic construct
EVQLVESGGGSVEAGGSLRLSCTASGFTFDDSDMGWYRQAPGNERELVSTIRSDGSAYYADSVKGRFTISQDNAKNTIYLQMNSLKPEDTAVYYCAADWPPGGQGTLVTVS

SEQ ID NO: 2450 - protein, 111 aa, synthetic construct
EVQLVESGGGSVEAGGSLRLSCTASGFTFDDSDMGWYRQAPGNERELVSTIRSDGSAYYADSVKGRFTISQDNAKNTVYLQMNSLKPEDTAVYYCAADWPPGGQGTLVTVS

SEQ ID NO: 2451 - protein, 111 aa, synthetic construct
EVQLVESGGGSVEAGGSLRLSCTASGFTFDDSDMGWYRQAPGNERELVSTIRSDGSTYYADSVKGRFTISQDNAKNTVYLQMNSLKPEDTAVYYCAADWPPGGQGTLVTVS

SEQ ID NO: 2452 - protein, 111 aa, synthetic construct
EVQLVESGGGSVEAGGSLRLSCTASGFTFDDSDMGWYRQAPGNERELVSTISSDGGTYYADSVKGRFTISQDNAKNTVYLQMNSLKPEDTAVYYCAADWPPGGQGTLVTVS

SEQ ID NO: 2453 - protein, 111 aa, synthetic construct
EVQLVESGGGSVEAGGSLRLSCTASGFTFDDSDMGWYRQARGNERELVSTIFSDGGTYYADSVKGRFTISQDNAKNTVYLQMNSLKPEDTAVYYCAADWPPGGQGTLVTVS

SEQ ID NO: 2454 - protein, 111 aa, synthetic construct
EVQLVESGGGSVEAGGSLRLSCTASGFTFDVSDMGWYRQAPGNERELVATIRSDGSTYYADSVKGRFTISQDNAKNTVYLQMNSLKPEDTAVYYCAADWPPGGQGTLVTVS

SEQ ID NO: 2455 - protein, 111 aa, synthetic construct
EVQLVESGGGSVEAGGSLRLSCTASGFTFDVSDMGWYRQAPGNERELVSTIFSDGGTYYADSVKGRFTISQDNAKNTVYLQMNSLKPEDTAVYYCAADWPPGGQGTLVTVS

SEQ ID NO: 2456 - protein, 111 aa, synthetic construct
EVQLVESGGGSVEAGGSLRLSCTASGFTFDVSDMGWYRQAPGNERELVSTIRSDGSTYYADSVKGRFTISQDNAKNTVYLQMNSLKPEDTAVYYCAADWPPGGQGTLVTVS

SEQ ID NO: 2457 - protein, 111 aa, synthetic construct
EVQLVESGGGSVEAGGSLRLSCTASGFTFDVSDMGWYRQAPGNERELVSTISSDGGTYYADSVKGRFTISQDNAKNTVYLQMNSLKPEDTAVYYCAADWPPGGQGTLVTVS

SEQ ID NO: 2458 - protein, 111 aa, synthetic construct
EVQLVESGGGSVEAGGSLRLSCTASGFTFDVSDMGWYRQAPGNERELVSTISSDGSTYYADSVKGRFTISQDNAKNTVYLQMNSLKPEDTAVYYCAADWPPGGQGTLVTVS

SEQ ID NO: 2459 - protein, 111 aa, synthetic construct
EVQLVESGGGSVEAGGSLRLSCTASGVTFDDSDMGWYRQAPGNERELVSTIFSDGGTYYADSVKGRFTISQDNAKNTVYLQMNSLKPEDTAVYYCAADWPPGGQGTLVTVS

SEQ ID NO: 2460 - protein, 111 aa, synthetic construct
EVQLVESGGGSVEAGGSLRLSRTASGFTFDDSDMGWYRQAPGNERELVATIRSDGGTYYADSVKGRFTISQDNAKNTVYLQMNSLKPEDTAVYYCAADWPPGGQGTLVTVS

SEQ ID NO: 2461 - protein, 111 aa, synthetic construct
EVQLVESGGGSVEAGGSLRLSRTASGFTFDDSDMGWYRQAPGNERELVATIRSDGSAYYADSVKGRFTISQDNAKNTVYLQMNSLKPEDTAVYYCAADWPPGGQGTLVTVS

SEQ ID NO: 2462 - protein, 111 aa, synthetic construct
EVQLVESGGGSVEAGGSLRLSRTASGFTFDDSDMGWYRQAPGNERELVSTIFSDGGTYYADSVKGRFTISQDNAKNTVYLQMNSLKPEDTAVYYCAADWPPGGQGTLVTVS

SEQ ID NO: 2463 - protein, 111 aa, synthetic construct
EVQLVESGGGSVQAGGSLRLSCTASGFTFDDSDMGWYRQAPGNECELVSTIFSDGGTYYADSVKGRFTISQDNAKNTVYLQMNSLKPEDTAVYYCAADWPPGGQGTLVTVS

SEQ ID NO: 2464 - protein, 111 aa, synthetic construct
EVQLVESGGGSVQAGGSLRLSCTASGFTFDDSDMGWYRQAPGNERELVATIFSDGGTYYADSVKGRFTISQDNAKNTVYLQMNSLKPEDTAVYYCAADWPPGGQGTLVTVS

SEQ ID NO: 2465 - protein, 111 aa, synthetic construct
EVQLVESGGGSVQAGGSLRLSCTASGFTFDDSDMGWYRQAPGNERELVATIRSDGGTYYADSVKGRFTISQDNAKNTVYLQMNSLKPEDTAVYYCAADWPPGGQGTLVTVS

SEQ ID NO: 2466 - protein, 111 aa, synthetic construct
EVQLVESGGGSVQAGGSLRLSCTASGFTFDDSDMGWYRQAPGNERELVATIRSDGSAYYADSVKGRFTISQDNAKNTVYLQMNSLKPEDTAVYYCAADWPPGGQGTLVTVS

SEQ ID NO: 2467 - protein, 111 aa, synthetic construct
EVQLVESGGGSVQAGGSLRLSCTASGFTFDDSDMGWYRQAPGNERELVATIRSDGSTYYADSVKGRFTISQDNAKNTVYLQMNSLKPEDTAVYYCAADWPPGGQGTLVTVS

SEQ ID NO: 2468 - protein, 111 aa, synthetic construct
EVQLVESGGGSVQAGGSLRLSCTASGFTFDDSDMGWYRQAPGNERELVSTIFSDGGTYYADSVKGRFSISQDNAKNTIYLQMNSLKPEDTAVYYCAADWPPGGQGTLVTVS

SEQ ID NO: 2469 - protein, 111 aa, synthetic construct
EVQLVESGGGSVQAGGSLRLSCTASGFTFDDSDMGWYRQAPGNERELVSTIFSDGGTYYADSVKGRFSISQDNAKNTVYLQMNSLKPEDTAVYYCAADWPPGGQGTLVTVS

SEQ ID NO: 2470 - protein, 111 aa, synthetic construct
EVQLVESGGGSVQAGGSLRLSCTASGFTFDDSDMGWYRQAPGNERELVSTIFSDGGTYYADSVKGRFTISQDNAKNTIYLQMNSLKPEDTAVYYCAADWPPGGQGTLVTVS

SEQ ID NO: 2471 - protein, 111 aa, synthetic construct
EVQLVESGGGSVQAGGSLRLSCTASGFTFDDSDMGWYRQAPGNERELVSTIFSDGGTYYADSVKGRFTISQDNAKNTVYLQMNSLKPEDTAMYYCAADWPPGGQGTLVTVS

SEQ ID NO: 2472 - protein, 111 aa, synthetic construct
EVQLVESGGGSVQAGGSLRLSCTASGFTFDDSDMGWYRQAPGNERELVSTIFSDGGTYYADSVKGRFTISQDNAKNTVYLQMNSLKPEDTAVYYCAADWPPGGQGTLVTVS

SEQ ID NO: 2473 - protein, 111 aa, synthetic construct
EVQLVESGGGSVQAGGSLRLSCTASGFTFDDSDMGWYRQAPGNERELVSTIFSDGGTYYGDSVKGRFSISQDNAKNTVYLQMNSLKPEDTAVYYCAADWPPGGQGTLVTVS

SEQ ID NO: 2474 - protein, 111 aa, synthetic construct
EVQLVESGGGSVQAGGSLRLSCTASGFTFDDSDMGWYRQAPGNERELVSTIFSDGGTYYGDSVKGRFTISQDNAKNTVYLQMNSLKPEDTAVYYCAADWPPGGQGTLVTVS

SEQ ID NO: 2475 - protein, 111 aa, synthetic construct
EVQLVESGGGSVQAGGSLRLSCTASGFTFDDSDMGWYRQAPGNERELVSTIFSDGGTYYVDSVKGRFTISQDNAKNTVYLQMNSLKPEDTAVYYCAADWPPGGQGTLVTVS

SEQ ID NO: 2476 - protein, 111 aa, synthetic construct
EVQLVESGGGSVQAGGSLRLSCTASGFTFDDSDMGWYRQAPGNERELVSTIFSDGSTYYADSVKGRFTISQDNAKNTVYLQMNSLKPEDTAVYYCAADWPPGGQGTLVTVS

SEQ ID NO: 2477 - protein, 111 aa, synthetic construct
EVQLVESGGGSVQAGGSLRLSCTASGFTFDDSDMGWYRQAPGNERELVSTIRSDGGTYYADSVKGRFTISQDNAKNTIYLQMNSLKPEDTAMYYCAADWPPGGQGTLVTVS

SEQ ID NO: 2478 - protein, 111 aa, synthetic construct
EVQLVESGGGSVQAGGSLRLSCTASGFTFDDSDMGWYRQAPGNERELVSTIRSDGGTYYADSVKGRFTISQDNAKNTVYLQMNSLKPEDTAVYYCAADWPPGGQGTLVTVS

SEQ ID NO: 2479 - protein, 111 aa, synthetic construct
EVQLVESGGGSVQAGGSLRLSCTASGFTFDDSDMGWYRQAPGNERELVSTIRSDGSAYYADSVKGRFTISQDNAKNTIYLQMNSLKPEDTAVYYCAADWPPGGQGTLVTVS

SEQ ID NO: 2480 - protein, 111 aa, synthetic construct
EVQLVESGGGSVQAGGSLRLSCTASGFTFDDSDMGWYRQAPGNERELVSTIRSDGSAYYADSVKGRFTISQDNAKNTVYLQMNSLKPEDTAVYYCAADWPPGGQGTLVTVS

SEQ ID NO: 2481 - protein, 111 aa, synthetic construct
EVQLVESGGGSVQAGGSLRLSCTASGFTFDDSDMGWYRQAPGNERELVSTIRSDGSTYYADSVKGRFTISQDNAKNTIYLQMNSLKPEDTAVYYCAADWPPGGQGTLVTVS

SEQ ID NO: 2482 - protein, 111 aa, synthetic construct
EVQLVESGGGSVQAGGSLRLSCTASGFTFDDSDMGWYRQAPGNERELVSTIRSDGSTYYADSVKGRFTISQDNAKNTVYLQMNSLKPEDTAVYYCAADWPPGGQGTLVTVS

SEQ ID NO: 2483 - protein, 111 aa, synthetic construct
EVQLVESGGGSVQAGGSLRLSCTASGFTFDDSDMGWYRQAPGNERELVSTISSDGGTYYADSVKGRFTISQDNAKNTVYLQMNSLKPEDTAVYYCAADWPPGGQGTLVTVS

SEQ ID NO: 2484 - protein, 111 aa, synthetic construct
EVQLVESGGGSVQAGGSLRLSCTASGFTFDDSDMGWYRQARGNERELVATIRSDGSAYYADSVKGRFTISQDNAKNTVYLQMNSLKPEDTAVYYCAADWPPGGQGTLVTVS

SEQ ID NO: 2485 - protein, 111 aa, synthetic construct
EVQLVESGGGSVQAGGSLRLSCTASGFTFDDSDMGWYRQARGNERELVSTIFSDGGTYYADSVKGRFTISQDNAKNTIYLQMNSLKPEDTAMYYCAADWPPGGQGTLVTVS

SEQ ID NO: 2486 - protein, 111 aa, synthetic construct
EVQLVESGGGSVQAGGSLRLSCTASGFTFDDSDMGWYRQARGNERELVSTIFSDGGTYYADSVKGRFTISQDNAKNTVYLQMNSLKPEDTAMYYCAADWPPGGQGTLVTVS

SEQ ID NO: 2487 - protein, 111 aa, synthetic construct
EVQLVESGGGSVQAGGSLRLSCTASGFTFDDSDMGWYRQARGNERELVSTIFSDGGTYYADSVKGRFTISQDNAKNTVYLQMNSLKPEDTAVYYCAADWPPGGQGTLVTVS

SEQ ID NO: 2488 - protein, 111 aa, synthetic construct
EVQLVESGGGSVQAGGSLRLSCTASGFTFDDSDMGWYRQARGNERELVSTIRSDGGTYYADSVKGRFTISQDNAKNTVYLQMNSLKPEDTAVYYCAADWPPGGQGTLVTVS

SEQ ID NO: 2489 - protein, 111 aa, synthetic construct
EVQLVESGGGSVQAGGSLRLSCTASGFTFDDSDMGWYRQARGNERELVSTIRSDGSAYYADSVKGRFTISQDNAKNTVYLQMNSLKPEDTAVYYCAADWPPGGQGTLVTVS

SEQ ID NO: 2490 - protein, 111 aa, synthetic construct
EVQLVESGGGSVQAGGSLRLSCTASGFTFDVSDMGWYRQAPGNECELVSTIRSDGSTYYADSVKGRFTISQDNAKNTVYLQMNSLKPEDTAVYYCAADWPPGGQGTLVTVS

SEQ ID NO: 2491 - protein, 111 aa, synthetic construct
EVQLVESGGGSVQAGGSLRLSCTASGFTFDVSDMGWYRQAPGNECELVSTISSDGSTYYADSVKGRFTISQDNAKNTVYLQMNSLKPEDTAVYYCAADWPPGGQGTLVTVS

SEQ ID NO: 2492 - protein, 111 aa, synthetic construct
EVQLVESGGGSVQAGGSLRLSCTASGFTFDVSDMGWYRQAPGNECELVSTVSSDGGTYYADSVKGRFTISQDNAKNTVYLQMNSLKPEDTAVYYCAADWPPGGQGTLVTVS

SEQ ID NO: 2493 - protein, 111 aa, synthetic construct
EVQLVESGGGSVQAGGSLRLSCTASGFTFDVSDMGWYRQAPGNECELVSTVSSDGSTYYADSVKGRFTISQDNAKNTVYLQMNSLKPEDTAVYYCAADWPPGGQGTLVTVS

SEQ ID NO: 2494 - protein, 111 aa, synthetic construct
EVQLVESGGGSVQAGGSLRLSCTASGFTFDVSDMGWYRQAPGNERELVATIFSDGGTYYADSVKGRFTISQDNAKNTVYLQMNSLKPEDTAVYYCAADWPPGGQGTLVTVS

SEQ ID NO: 2495 - protein, 111 aa, synthetic construct
EVQLVESGGGSVQAGGSLRLSCTASGFTFDVSDMGWYRQAPGNERELVATIRSDGGTYYADSVKGRFTISQDNAKNTVYLQMNSLKPEDTAVYYCAADWPPGGQGTLVTVS

SEQ ID NO: 2496 - protein, 111 aa, synthetic construct
EVQLVESGGGSVQAGGSLRLSCTASGFTFDVSDMGWYRQAPGNERELVATIRSDGSAYYADSVKGRFTISQDNAKNTVYLQMNSLKPEDTAVYYCAADWPPGGQGTLVTVS

SEQ ID NO: 2497 - protein, 111 aa, synthetic construct
EVQLVESGGGSVQAGGSLRLSCTASGFTFDVSDMGWYRQAPGNERELVATIRSDGSTYYADSVKGRFTISQDNAKNTVYLQMNSLKPEDTAVYYCAADWPPGGQGTLVTVS

SEQ ID NO: 2498 - protein, 111 aa, synthetic construct
EVQLVESGGGSVQAGGSLRLSCTASGFTFDVSDMGWYRQAPGNERELVATISSDGSTYYADSVKGRFTISQDNAKNTVYLQMNSLKPEDTAVYYCAADWPPGGQGTLVTVS

SEQ ID NO: 2499 - protein, 111 aa, synthetic construct
EVQLVESGGGSVQAGGSLRLSCTASGFTFDVSDMGWYRQAPGNERELVSTIFSDGGTYYADSVKGRFSISQDNAKNTVYLQMNSLKPEDTAVYYCAADWPPGGQGTLVTVS

SEQ ID NO: 2500 - protein, 111 aa, synthetic construct
EVQLVESGGGSVQAGGSLRLSCTASGFTFDVSDMGWYRQAPGNERELVSTIFSDGGTYYADSVKGRFTISQDNAKNTIYLQMNSLKPEDTAVYYCAADWPPGGQGTLVTVS

SEQ ID NO: 2501 - protein, 111 aa, synthetic construct
EVQLVESGGGSVQAGGSLRLSCTASGFTFDVSDMGWYRQAPGNERELVSTIFSDGGTYYADSVKGRFTISQDNAKNTVYLQMNSLKPEDTAMYYCAADWPPGGQGTLVTVS

SEQ ID NO: 2502 - protein, 111 aa, synthetic construct
EVQLVESGGGSVQAGGSLRLSCTASGFTFDVSDMGWYRQAPGNERELVSTIFSDGGTYYADSVKGRFTISQDNAKNTVYLQMNSLKPEDTAVYYCAADWPPGGQGTLVTVS

SEQ ID NO: 2503 - protein, 111 aa, synthetic construct
EVQLVESGGGSVQAGGSLRLSCTASGFTFDVSDMGWYRQAPGNERELVSTIFSDGGTYYGDSVKGRFSISQDNAKNTVYLQMNSLKPEDTAVYYCAADWPPGGQGTLVTVS

SEQ ID NO: 2504 - protein, 111 aa, synthetic construct
EVQLVESGGGSVQAGGSLRLSCTASGFTFDVSDMGWYRQAPGNERELVSTIFSDGSTYYADSVKGRFTISQDNAKNTVYLQMNSLKPEDTAVYYCAADWPPGGQGTLVTVS

SEQ ID NO: 2505 - protein, 111 aa, synthetic construct
EVQLVESGGGSVQAGGSLRLSCTASGFTFDVSDMGWYRQAPGNERELVSTIRSDGGTYYADSVKGRFTISQDNAKNTVYLQMNSLKPEDTAVYYCAADWPPGGQGTLVTVS

SEQ ID NO: 2506 - protein, 111 aa, synthetic construct
EVQLVESGGGSVQAGGSLRLSCTASGFTFDVSDMGWYRQAPGNERELVSTIRSDGSAYYADSVKGRFTISQDNAKNTIYLQMNSLKPEDTAVYYCAADWPPGGQGTLVTVS

SEQ ID NO: 2507 - protein, 111 aa, synthetic construct
EVQLVESGGGSVQAGGSLRLSCTASGFTFDVSDMGWYRQAPGNERELVSTIRSDGSAYYADSVKGRFTISQDNAKNTVYLQMNSLKPEDTAVYYCAADWPPGGQGTLVTVS

SEQ ID NO: 2508 - protein, 111 aa, synthetic construct
EVQLVESGGGSVQAGGSLRLSCTASGFTFDVSDMGWYRQAPGNERELVSTIRSDGSTYYADSVKGRFTISQDNAKNTVYLQMNSLKPEDTAVYYCAADWPPGGQGTLVTVS

SEQ ID NO: 2509 - protein, 111 aa, synthetic construct
EVQLVESGGGSVQAGGSLRLSCTASGFTFDVSDMGWYRQAPGNERELVSTISSDGGTYYADSVKGRFTISQDNAKNTIYLQMNSLKPEDTAVYYCAADWPPGGQGTLVTVS

SEQ ID NO: 2510 - protein, 111 aa, synthetic construct
EVQLVESGGGSVQAGGSLRLSCTASGFTFDVSDMGWYRQAPGNERELVSTISSDGGTYYADSVKGRFTISQDNAKNTVYLQMNSLKPEDTAVYYCAADWPPGGQGTLVTVS

SEQ ID NO: 2511 - protein, 111 aa, synthetic construct
EVQLVESGGGSVQAGGSLRLSCTASGFTFDVSDMGWYRQAPGNERELVSTISSDGSTLYADSVKGRFTISQDNAKNTVYLQMNSLKPEDTAVYYCAADWPPGGQGTLVTVS

SEQ ID NO: 2512 - protein, 111 aa, synthetic construct
EVQLVESGGGSVQAGGSLRLSCTASGFTFDVSDMGWYRQAPGNERELVSTISSDGSTYYADSVKGRFTISQDNAKNTVYLQMNSLKPEDTAVYYCAADWPPGGQGTLVTVS

SEQ ID NO: 2513 - protein, 111 aa, synthetic construct
EVQLVESGGGSVQAGGSLRLSCTASGFTFDVSDMGWYRQAPGNERELVSTISSDGSTYYADSVKGRFTISQDNAKTTVYLQMNSLKPEDTAVYYCAADWPPGGQGTLVTVS

SEQ ID NO: 2514 - protein, 111 aa, synthetic construct
EVQLVESGGGSVQAGGSLRLSCTASGFTFDVSDMGWYRQAPGNERELVSTISSDGTTYYADSVKGRFTISQDNAKNTVYLQMNSLKPEDTAVYYCAADWPPGGQGTLVTVS

SEQ ID NO: 2515 - protein, 111 aa, synthetic construct
EVQLVESGGGSVQAGGSLRLSCTASGFTFDVSDMGWYRQAPGNERELVSTVSSDGSTYYADSVKGRFTISQDNAKNTVYLQMNSLKPEDTAVYYCAADWPPGGQGTLVTVS

SEQ ID NO: 2516 - protein, 111 aa, synthetic construct
EVQLVESGGGSVQAGGSLRLSCTASGFTFDVSDMGWYRQARGNERELVSTIFSDGGTYYADSVKGRFTISQDNAKNTVYLQMNSLKPEDTAVYYCAADWPPGGQGTLVTVS

SEQ ID NO: 2517 - protein, 111 aa, synthetic construct
EVQLVESGGGSVQAGGSLRLSRTASGFTFDDSDMGWYRQAPGNERELVATIFSDGGTYYADSVKGRFTISQDNAKNTVYLQMNSLKPEDTAVYYCAADWPPGGQGTLVTVS

SEQ ID NO: 2518 - protein, 111 aa, synthetic construct
EVQLVESGGGSVQAGGSLRLSRTASGFTFDDSDMGWYRQAPGNERELVATIRSDGGTYYADSVKGRFTISQDNAKNTVYLQMNSLKPEDTAVYYCAADWPPGGQGTLVTVS

SEQ ID NO: 2519 - protein, 111 aa, synthetic construct
EVQLVESGGGSVQAGGSLRLSRTASGFTFDDSDMGWYRQAPGNERELVATIRSDGSAYYADSVKGRFTISQDNAKNTVYLQMNSLKPEDTAVYYCAADWPPGGQGTLVTVS

SEQ ID NO: 2520 - protein, 111 aa, synthetic construct
EVQLVESGGGSVQAGGSLRLSRTASGFTFDDSDMGWYRQAPGNERELVATIRSDGSAYYVDSVKGRFTISQDNAKNTVYLQMNSLKPEDTAVYYCAADWPPGGQGTLVTVS

SEQ ID NO: 2521 - protein, 111 aa, synthetic construct
EVQLVESGGGSVQAGGSLRLSRTASGFTFDDSDMGWYRQAPGNERELVATIRSDGSTYYADSVKGRFTISQDNAKNTVYLQMNSLKPEDTAVYYCAADWPPGGQGTLVTVS

SEQ ID NO: 2522 - protein, 111 aa, synthetic construct
EVQLVESGGGSVQAGGSLRLSRTASGFTFDDSDMGWYRQAPGNERELVSTIFSDGGTYYADSVKGRFSISQDNAKNTVYLQMNSLKPEDTAVYYCAADWPPGGQGTLVTVS

SEQ ID NO: 2523 - protein, 111 aa, synthetic construct
EVQLVESGGGSVQAGGSLRLSRTASGFTFDDSDMGWYRQAPGNERELVSTIFSDGGTYYADSVKGRFTISQDNAKNTIYLQMNSLKPEDTAVYYCAADWPPGGQGTLVTVS

SEQ ID NO: 2524 - protein, 111 aa, synthetic construct
EVQLVESGGGSVQAGGSLRLSRTASGFTFDDSDMGWYRQAPGNERELVSTIFSDGGTYYADSVKGRFTISQDNAKNTVYLQMNSLKPEDTAVYYCAADWPPGGQGTLVTVS

SEQ ID NO: 2525 - protein, 111 aa, synthetic construct
EVQLVESGGGSVQAGGSLRLSRTASGFTFDDSDMGWYRQAPGNERELVSTIRSDGSAYYADSVKGRFTISQDNAKNTIYLQMNSLKPEDTAVYYCAADWPPGGQGTLVTVS

SEQ ID NO: 2526 - protein, 111 aa, synthetic construct
EVQLVESGGGSVQAGGSLRLSRTASGFTFDDSDMGWYRQAPGNERELVSTIRSDGSAYYADSVKGRFTISQDNAKNTVYLQMNSLKPEDTAVYYCAADWPPGGQGTLVTVS

SEQ ID NO: 2527 - protein, 111 aa, synthetic construct
EVQLVESGGGSVQAGGSLRLSRTASGFTFDDSDMGWYRQAPGNERELVSTIRSDGSTYYADSVKGRFTISQDNAKNTIYLQMNSLKPEDTAVYYCAADWPPGGQGTLVTVS

SEQ ID NO: 2528 - protein, 111 aa, synthetic construct
EVQLVESGGGSVQAGGSLRLSRTASGFTFDDSDMGWYRQAPGNERELVSTIRSDGSTYYADSVKGRFTISQDNAKNTVYLQMNSLKPEDTAVYYCAADWPPGGQGTLVTVS

SEQ ID NO: 2529 - protein, 111 aa, synthetic construct
EVQLVESGGGSVQAGGSLRLSRTASGFTFDDSDMGWYRQAPGNERELVSTISSDGGTYYADSVKGRFTISQDNAKNTVYLQMNSLKPEDTAVYYCAADWPPGGQGTLVTVS

SEQ ID NO: 2530 - protein, 111 aa, synthetic construct
EVQLVESGGGSVQAGGSLRLSRTASGFTFDDSDMGWYRQARGNERELVATIRSDGSTYYADSVKGRFTISQDNAKNTVYLQMNSLKPEDTAVYYCAADWPPGGQGTLVTVS

SEQ ID NO: 2531 - protein, 111 aa, synthetic construct
EVQLVESGGGSVQAGGSLRLSRTASGFTFDDSDMGWYRQARGNERELVSTIFSDGGTYYADSVKGRFTISQDNAKNTVYLQMNSLKPEDTAVYYCAADWPPGGQGTLVTVS

SEQ ID NO: 2532 - protein, 111 aa, synthetic construct
EVQLVESGGGSVQAGGSLRLSRTASGFTFDVSDMGWYRQAPGNERELVATIRSDGSAYYADSVKGRFTISQDNAKNTVYLQMNSLKPEDTAVYYCAADWPPGGQGTLVTVS

SEQ ID NO: 2533 - protein, 111 aa, synthetic construct
EVQLVESGGGSVQAGGSLRLSRTASGFTFDVSDMGWYRQAPGNERELVATIRSDGSTYYADSVKGRFTISQDNAKNTVYLQMNSLKPEDTAVYYCAADWPPGGQGTLVTVS

SEQ ID NO: 2534 - protein, 111 aa, synthetic construct
EVQLVESGGGSVQAGGSLRLSRTASGFTFDVSDMGWYRQAPGNERELVSTIFSDGGTYYADSVKGRFTISQDNAKNTVYLQMNSLKPEDTAVYYCAADWPPGGQGTLVTVS

SEQ ID NO: 2535 - protein, 111 aa, synthetic construct
EVQLVESGGGSVQAGGSLRLSRTASGFTFDVSDMGWYRQAPGNERELVSTIRSDGSAYYADSVKGRFTISQDNAKNTVYLQMNSLKPEDTAVYYCAADWPPGGQGTLVTVS

SEQ ID NO: 2536 - protein, 111 aa, synthetic construct
EVQLVESGGGSVQAGGSLRLSRTASGFTFDVSDMGWYRQAPGNERELVSTIRSDGSTYYADSVKGRFTISQDNAKNTVYLQMNSLKPEDTAVYYCAADWPPGGQGTLVTVS

SEQ ID NO: 2537 - protein, 111 aa, synthetic construct
EVQLVESGGGSVQAGGSLRLSRTASGFTFDVSDMGWYRQAPGNERELVSTISSDGGTYYADSVKGRFTISQDNAKNTVYLQMNSLKPEDTAVYYCAADWPPGGQGTLVTVS

SEQ ID NO: 2538 - protein, 111 aa, synthetic construct
EVQVVESGGGSVEAGGSLRLSCTASGFTFDDSDMGWYRQAPGNERELVATIRSDGSAYYADSVKGRFTISQDNAKNTVYLQMNSLKPEDTAVYYCAADWPPGGQGTLVTVS

SEQ ID NO: 2539 - protein, 111 aa, synthetic construct
EVQVVESGGGSVEAGGSLRLSCTASGFTFDDSDMGWYRQAPGNERELVSTIFSDGGTYYADSVKGRFTISQDNAKNTVYLQMNSLKPEDTAVYYCAADWPPGGQGTLVTVS

SEQ ID NO: 2540 - protein, 111 aa, synthetic construct
EVQVVESGGGSVEAGGSLRLSCTASGFTFDDSDMGWYRQAPGNERELVSTIRSDGGTYYADSVKGRFTISQDNAKNTVYLQMNSLKPEDTAVYYCAADWPPGGQGTLVTVS

SEQ ID NO: 2541 - protein, 111 aa, synthetic construct
EVQVVESGGGSVEAGGSLRLSCTASGFTFDDSDMGWYRQAPGNERELVSTIRSDGSAYYADSVKGRFTISQDNAKNTVYLQMNSLKPEDTAVYYCAADWPPGGQGTLVTVS

SEQ ID NO: 2542 - protein, 111 aa, synthetic construct
EVQVVESGGGSVEAGGSLRLSCTASGFTFDVSDMGWYRQAPGNERELVSTIFSDGGTYYADSVKGRFTISQDNAKNTVYLQMNSLKPEDTAVYYCAADWPPGGQGTLVTVS

SEQ ID NO: 2543 - protein, 111 aa, synthetic construct
EVQVVESGGGSVQAGGSLRLSCTASGFTFDDSDMGWYRQAPGNECELVSTIFSDGGTYYADSVKGRFTISQDNAKNTVYLQMNSLKPEDTAVYYCAADWPPGGQGTLVTVS

SEQ ID NO: 2544 - protein, 111 aa, synthetic construct
EVQVVESGGGSVQAGGSLRLSCTASGFTFDDSDMGWYRQAPGNERELVATIRSDGGTYYADSVKGRFTISQDNAKNTVYLQMNSLKPEDTAVYYCAADWPPGGQGTLVTVS

SEQ ID NO: 2545 - protein, 111 aa, synthetic construct
EVQVVESGGGSVQAGGSLRLSCTASGFTFDDSDMGWYRQAPGNERELVATIRSDGSAYYADSVKGRFTISQDNAKNTVYLQMNSLKPEDTAVYYCAADWPPGGQGTLVTVS

SEQ ID NO: 2546 - protein, 111 aa, synthetic construct
EVQVVESGGGSVQAGGSLRLSCTASGFTFDDSDMGWYRQAPGNERELVSTIFSDGGTYYADSVKGRFSISQDNAKNTVYLQMNSLKPEDTAVYYCAADWPPGGQGTLVTVS

SEQ ID NO: 2547 - protein, 111 aa, synthetic construct
EVQVVESGGGSVQAGGSLRLSCTASGFTFDDSDMGWYRQAPGNERELVSTIFSDGGTYYADSVKGRFTISQDNAKNTIYLQMNSLKPEDTAMYYCAADWPPGGQGTLVTVS

SEQ ID NO: 2548 - protein, 111 aa, synthetic construct
EVQVVESGGGSVQAGGSLRLSCTASGFTFDDSDMGWYRQAPGNERELVSTIFSDGGTYYADSVKGRFTISQDNAKNTIYLQMNSLKPEDTAVYYCAADWPPGGQGTLVTVS

SEQ ID NO: 2549 - protein, 111 aa, synthetic construct
EVQVVESGGGSVQAGGSLRLSCTASGFTFDDSDMGWYRQAPGNERELVSTIFSDGGTYYADSVKGRFTISQDNAKNTVYLQMNSLKPEDTAMYYCAADWPPGGQGTLVTVS

SEQ ID NO: 2550 - protein, 111 aa, synthetic construct
EVQVVESGGGSVQAGGSLRLSCTASGFTFDDSDMGWYRQAPGNERELVSTIFSDGGTYYADSVKGRFTISQDNAKNTVYLQMNSLKPEDTAVYYCAADWPPGGQGTLVTVS

SEQ ID NO: 2551 - protein, 111 aa, synthetic construct
EVQVVESGGGSVQAGGSLRLSCTASGFTFDDSDMGWYRQAPGNERELVSTIFSDGGTYYVDSVKGRFTISQDNAKNTVYLQMNSLKPEDTAVYYCAADWPPGGQGTLVTVS

SEQ ID NO: 2552 - protein, 111 aa, synthetic construct
EVQVVESGGGSVQAGGSLRLSCTASGFTFDDSDMGWYRQAPGNERELVSTIRSDGGTYYADSVKGRFTISQDNAKNTVYLQMNSLKPEDTAVYYCAADWPPGGQGTLVTVS

SEQ ID NO: 2553 - protein, 111 aa, synthetic construct
EVQVVESGGGSVQAGGSLRLSCTASGFTFDDSDMGWYRQAPGNERELVSTIRSDGSAYYADSVKGRFTISQDNAKNTVYLQMNSLKPEDTAVYYCAADWPPGGQGTLVTVS

SEQ ID NO: 2554 - protein, 111 aa, synthetic construct
EVQVVESGGGSVQAGGSLRLSCTASGFTFDDSDMGWYRQAPGNERELVSTISSDGGTYYADSVKGRFTISQDNAKNTVYLQMNSLKPEDTAVYYCAADWPPGGQGTLVTVS

SEQ ID NO: 2555 - protein, 111 aa, synthetic construct
EVQVVESGGGSVQAGGSLRLSCTASGFTFDDSDMGWYRQARGNERELVSTIFSDGGTYYADSVKGRFTISQDNAKNTVYLQMNSLKPEDTAVYYCAADWPPGGQGTLVTVS

SEQ ID NO: 2556 - protein, 111 aa, synthetic construct
EVQVVESGGGSVQAGGSLRLSCTASGFTFDVSDMGWYRQAPGNERELVATIRSDGSAYYADSVKGRFTISQDNAKNTVYLQMNSLKPEDTAVYYCAADWPPGGQGTLVTVS

SEQ ID NO: 2557 - protein, 111 aa, synthetic construct
EVQVVESGGGSVQAGGSLRLSCTASGFTFDVSDMGWYRQAPGNERELVATIRSDGSTYYADSVKGRFTISQDNAKNTVYLQMNSLKPEDTAVYYCAADWPPGGQGTLVTVS

SEQ ID NO: 2558 - protein, 111 aa, synthetic construct
EVQVVESGGGSVQAGGSLRLSCTASGFTFDVSDMGWYRQAPGNERELVSTIFSDGGTYYADSVKGRFTISQDNAKNTVYLQMNSLKPEDTAVYYCAADWPPGGQGTLVTVS

SEQ ID NO: 2559 - protein, 111 aa, synthetic construct
EVQVVESGGGSVQAGGSLRLSCTASGFTFDVSDMGWYRQAPGNERELVSTIRSDGGTYYADSVKGRFTISQDNAKNTVYLQMNSLKPEDTAVYYCAADWPPGGQGTLVTVS

SEQ ID NO: 2560 - protein, 111 aa, synthetic construct
EVQVVESGGGSVQAGGSLRLSCTASGFTFDVSDMGWYRQAPGNERELVSTIRSDGSAYYADSVKGRFTISQDNAKNTVYLQMNSLKPEDTAVYYCAADWPPGGQGTLVTVS

SEQ ID NO: 2561 - protein, 111 aa, synthetic construct
EVQVVESGGGSVQAGGSLRLSCTASGFTFDVSDMGWYRQAPGNERELVSTIRSDGSTYYADSVKGRFTISQDNAKNTVYLQMNSLKPEDTAVYYCAADWPPGGQGTLVTVS

SEQ ID NO: 2562 - protein, 111 aa, synthetic construct
EVQVVESGGGSVQAGGSLRLSCTASGFTFDVSDMGWYRQAPGNERELVSTISSDGGTYYADSVKGRFTISQDNAKNTVYLQMNSLKPEDTAVYYCAADWPPGGQGTLVTVS

SEQ ID NO: 2563 - protein, 111 aa, synthetic construct
EVQVVESGGGSVQAGGSLRLSRTASGFTFDDSDMGWYRQAPGNECELVSTIFSDGGTYYADSVKGRFTISQDNAKNTVYLQMNSLKPEDTAVYYCAADWPPGGQGTLVTVS

SEQ ID NO: 2564 - protein, 111 aa, synthetic construct
EVQVVESGGGSVQAGGSLRLSRTASGFTFDDSDMGWYRQAPGNERELVATIFSDGGTYYADSVKGRFTISQDNAKNTVYLQMNSLKPEDTAVYYCAADWPPGGQGTLVTVS

SEQ ID NO: 2565 - protein, 111 aa, synthetic construct
EVQVVESGGGSVQAGGSLRLSRTASGFTFDDSDMGWYRQAPGNERELVATIRSDGSAYYADSVKGRFTISQDNAKNTVYLQMNSLKPEDTAVYYCAADWPPGGQGTLVTVS

SEQ ID NO: 2566 - protein, 111 aa, synthetic construct
EVQVVESGGGSVQAGGSLRLSRTASGFTFDDSDMGWYRQAPGNERELVATIRSDGSAYYVDSVKGRFTISQDNAKNTVYLQMNSLKPEDTAVYYCAADWPPGGQGTLVTVS

SEQ ID NO: 2567 - protein, 111 aa, synthetic construct
EVQVVESGGGSVQAGGSLRLSRTASGFTFDDSDMGWYRQAPGNERELVATIRSDGSTYYADSVKGRFTISQDNAKNTVYLQMNSLKPEDTAVYYCAADWPPGGQGTLVTVS

SEQ ID NO: 2568 - protein, 111 aa, synthetic construct
EVQVVESGGGSVQAGGSLRLSRTASGFTFDDSDMGWYRQAPGNERELVSTIFSDGGTYYADSVKGRFTISQDNAKNTVYLQMNSLKPEDTAVYYCAADWPPGGQGTLVTVS

SEQ ID NO: 2569 - protein, 111 aa, synthetic construct
EVQVVESGGGSVQAGGSLRLSRTASGFTFDDSDMGWYRQAPGNERELVSTIRSDGSAYYADSVKGRFTISQDNAKNTVYLQMNSLKPEDTAVYYCAADWPPGGQGTLVTVS

SEQ ID NO: 2570 - protein, 111 aa, synthetic construct
EVQVVESGGGSVQAGGSLRLSRTASGFTFDDSDMGWYRQAPGNERELVSTIRSDGSTYYADSVKGRFTISQDNAKNTVYLQMNSLKPEDTAVYYCAADWPPGGQGTLVTVS

SEQ ID NO: 2571 - protein, 111 aa, synthetic construct
EVQVVESGGGSVQAGGSLRLSRTASGFTFDVSDMGWYRQAPGNERELVSTIFSDGGTYYADSVKGRFTISQDNAKNTVYLQMNSLKPEDTAVYYCAADWPPGGQGTLVTVS

SEQ ID NO: 2572 - protein, 8 aa, synthetic construct
GVTFDDSD

SEQ ID NO: 2573 - protein, 7 aa, synthetic construct
IFSDGGT

SEQ ID NO: 2574 - protein, 7 aa, synthetic construct
IRSDGSA

SEQ ID NO: 2575 - protein, 7 aa, synthetic construct
IRSDGGT

SEQ ID NO: 2576 - protein, 7 aa, synthetic construct
VSSDGGT

SEQ ID NO: 2577 - protein, 8 aa, synthetic construct
TVSSDGST

SEQ ID NO: 2578 - protein, 7 aa, synthetic construct
ISSDGTT

SEQ ID NO: 2579 - protein, 8 aa, synthetic construct
GSILSINA

SEQ ID NO: 2580 - protein, 8 aa, synthetic construct
GSIFLVNA

SEQ ID NO: 2581 - protein, 8 aa, synthetic construct
INAGGGST

SEQ ID NO: 2582 - protein, 8 aa, synthetic construct
AAAGGFRY

SEQ ID NO: 2583 - protein, 11 aa, synthetic construct
AAEDFGNSKAY

SEQ ID NO: 2584 - protein, 11 aa, synthetic construct
AAEDFGNSKTH

SEQ ID NO: 2585 - protein, 11 aa, synthetic construct
AAEDFGNTKTY

SEQ ID NO: 2586 - protein, 11 aa, synthetic construct
AAEYFGNSKTY

SEQ ID NO: 2587 - protein, 114 aa, synthetic construct
ESGGGSVQAGGSLRLSCTAPGFKRNSWGMDWYRQAPGKERDFVSSISADGTTSYADSVKGRFTISKDKAKDTFYLQMNSLKPEDSAMYSCKAYGYDENYYAMDYWGQGTSVTVS

SEQ ID NO: 2588 - protein, 118 aa, synthetic construct
VKLEESGGGSVQAGGSLRLSCTALGFRSNSCGMDWYRQALGKEREFVSSISPDGTTSYADSVKGRFTISKDKAKATVYLQMNSLKPDDTAMYSCKAYGYDENYYAMDYWGQGTSVTVS

SEQ ID NO: 2589 - protein, 118 aa, synthetic construct
VKLEESGGGSVQAGGSLRLSCTALGFRSNSCGMDWYRQAPGKERDFVSSISRDGTTSYADSVKGRFTISKDKATDTVYLQMNSLKPEDTAMYSCKAYGYDENYFPMDYWGQGTSVTVS

SEQ ID NO: 2590 - protein, 118 aa, synthetic construct
VKLEESGGGSVQAGGSLRLSCTALGFRSNSCGMDWYRQAPGKERDFVSSISRDGTTSYADSVKGRFTISKDKATDTVYLQMNSLKPEDTAMYSCKAYGYDENYYAMDYWGQGTSVTVS

SEQ ID NO: 2591 - protein, 118 aa, synthetic construct
VKLEESGGGSVQAGGSLRLSCTALGFRSNSCGMDWYRQAPGKEREFVASISADGTTSYADSVKGRFTISKDKATDTVYLQMNSLKPEDTAMYSCKAYGYDENYFPMDYWGQGTSVTVS

SEQ ID NO: 2592 - protein, 118 aa, synthetic construct
VKLEESGGGSVQAGGSLRLSCTALGFRSNSCGMDWYRQAPGKEREFVSSIDRDGTTSYADSVKGRFTISKDKATDTVYLQMNSLKPEDTAMYSCKAYGYDENYFPMDYWGQGTSVTVS

SEQ ID NO: 2593 - protein, 118 aa, synthetic construct
VKLEESGGGSVQAGGSLRLSCTALGFRSNSCGMDWYRQAPGKEREFVSSIDRDGTTSYADSVKGRFTISKDKATDTVYLQMNSLKPEDTAMYSCKAYGYDENYYAMDYWGQGTSVTVS

SEQ ID NO: 2594 - protein, 118 aa, synthetic construct
VKLEESGGGSVQAGGSLRLSCTALGFRSNSCGMDWYRQAPGKEREFVSSISADGTTSYADSVKGRFTISKDKAKATVYLQMNSLKPDDTAMYSCKAYGYDENYFPMDYWGQGTSVTVS

SEQ ID NO: 2595 - protein, 118 aa, synthetic construct
VKLEESGGGSVQAGGSLRLSCTALGFRSNSCGMDWYRQAPGKEREFVSSISADGTTSYADSVKGRFTISKDKATDTVYLQMNSLKPEDTAMYSCKAYGYDENYFPMDYWGQGTSVTVS

SEQ ID NO: 2596 - protein, 118 aa, synthetic construct
VKLEESGGGSVQAGGSLRLSCTALGFRSNSCGMDWYRQAPGKEREFVSSISADGTTSYADSVKGRFTISKDKATDTVYLQMNSLKPEDTAMYSCKAYGYDENYYAMDYWGQGTSVTVS

SEQ ID NO: 2597 - protein, 118 aa, synthetic construct
VKLEESGGGSVQAGGSLRLSCTALGFRSNSCGMDWYRQAPGKEREFVSSISPDGTTSYADSVKGRFTISKDKATDTVYLQMNSLKPEDTAMYSCKAYGYDENYFPMDYWGQGTSVTVS

SEQ ID NO: 2598 - protein, 118 aa, synthetic construct
VKLEESGGGSVQAGGSLRLSCTALGFRSNSCGMDWYRQAPGKEREFVSSISRDGTTSYADSVKGRFTISKDKATDTVYLQMNSLKPEDTAMYSCKAYGYDENYFPMDYWGQGTSVTVS

SEQ ID NO: 2599 - protein, 118 aa, synthetic construct
VKLEESGGGSVQAGGSLRLSCTALGFRSNSWGMDWYRQAPGKERDFVSSISRDGTTSYADSVKGRFTISKDKAKDTFYLQMNSLKPEDTAMYSCKAYGYDKNYYAMDYWGQGTSVTVS

SEQ ID NO: 2600 - protein, 118 aa, synthetic construct
VKLEESGGGSVQAGGSLRLSCTALGFRSNSWGMDWYRQAPGKERDFVSSISRDGTTSYADSVKGRFTISKDKATDTVYLQMNSLKPEDTAMYSCKAYGYDENYFPMDYWGQGTSVTVS

SEQ ID NO: 2601 - protein, 118 aa, synthetic construct
VKLEESGGGSVQAGGSLRLSCTALGFRSNSWGMDWYRQAPGKERDFVSSISRDGTTSYADSVKGRFTISKDKATDTVYLQMNSLKPEDTAMYSCKAYGYDENYYAMDYWGQGTSVTVS

SEQ ID NO: 2602 - protein, 118 aa, synthetic construct
VKLEESGGGSVQAGGSLRLSCTAPGFKRNSWGMDWYRQAPGKERDFVSSISADGTTSYADSVKGRFTISKDKAKDTFYLQMNNLKPEDTAMYSCKAYGYDENYYAMDYWGQGTSVTVS

SEQ ID NO: 2603 - protein, 118 aa, synthetic construct
VKLEESGGGSVQAGGSLRLSCTAPGFKRNSWGMDWYRQAPGKERDFVSSISADGTTSYADSVKGRFTISKDKAKDTFYLQMNSLKPEDTAMYSCKAYGYDENYYAMDYWGQGTSVTVS

SEQ ID NO: 2604 - protein, 118 aa, synthetic construct
VKLEESGGGSVQAGGSLRLSCTAPGFKRNSWGMDWYRQAPGKERDFVSSISADGTTSYADSVKGRFTISKDKATDTVYLQMNSLKPEDTAMYSCKAYGYDENYYAMDYWGQGTSVTVS

SEQ ID NO: 2605 - protein, 118 aa, synthetic construct
VKLEESGGGSVQAGGSLRLSCTAPGFKRNSWGMDWYRQAPGKERDFVSSISPDGTTSYADSVKGRFTISKDKAKATVYLQMNSLKPDDTAMYSCKAYGYDENYYAMDYWGQGTSVTVS

SEQ ID NO: 2606 - protein, 118 aa, synthetic construct
VKLEESGGGSVQAGGSLRLSCTAPGFKRNSWGMDWYRQAPGKERDFVSSISRDGTTSYADSVKGRFTISKDKAKATVYLQMNSLKPDDTAMYSCKAYGYDENYYAMDYWGQGTSVTVS

SEQ ID NO: 2607 - protein, 118 aa, synthetic construct
VKLEESGGGSVQAGGSLRLSCTAPGFKRNSWGMDWYRQAPGKERDFVSSISRDGTTSYADSVKGRFTISKDKAKATVYLQMNSLKPDDTAMYSCKAYGYDENYYFMDYWGQGTSVTVS

SEQ ID NO: 2608 - protein, 118 aa, synthetic construct
VKLEESGGGSVQAGGSLRLSCTAPGFKRNSWGMDWYRQAPGKERDFVSSISRDGTTSYADSVKGRFTISKDKAKDTFYLQMNNLKPEDTAMYLCKAYGYDENYFAMDYWGQGTSVTVS

SEQ ID NO: 2609 - protein, 118 aa, synthetic construct
VKLEESGGGSVQAGGSLRLSCTAPGFKRNSWGMDWYRQAPGKERDFVSSISRDGTTSYADSVKGRFTISKDKAKDTFYLQMNNLKPEDTAMYSCKAYGYDENYFPMDYWGQGTSVTVS

SEQ ID NO: 2610 - protein, 118 aa, synthetic construct
VKLEESGGGSVQAGGSLRLSCTAPGFKRNSWGMDWYRQAPGKERDFVSSISRDGTTSYADSVKGRFTISKDKAKDTFYLQMNNLKPEDTAMYSCKAYGYDENYYAMDYWGQGTSVTVS

SEQ ID NO: 2611 - protein, 118 aa, synthetic construct
VKLEESGGGSVQAGGSLRLSCTAPGFKRNSWGMDWYRQAPGKERDFVSSISRDGTTSYADSVKGRFTISKDKAKDTFYLQMNSLKPEDSAMYSCKAYGYDENYFPMDYWGQGTSVTVS

SEQ ID NO: 2612 - protein, 118 aa, synthetic construct
VKLEESGGGSVQAGGSLRLSCTAPGFKRNSWGMDWYRQAPGKERDFVSSISRDGTTSYADSVKGRFTISKDKAKDTFYLQMNSLKPEDSAMYSCKAYGYDENYYAMDYWGQGTSVTVS

SEQ ID NO: 2613 - protein, 118 aa, synthetic construct
VKLEESGGGSVQAGGSLRLSCTAPGFKRNSWGMDWYRQAPGKERDFVSSISRDGTTSYADSVKGRFTISKDKAKDTFYLQMNSLKPEDTAMYSCKAYGYDENYFPMDYWGQGTSVTVS

SEQ ID NO: 2614 - protein, 118 aa, synthetic construct
VKLEESGGGSVQAGGSLRLSCTAPGFKRNSWGMDWYRQAPGKERDFVSSISRDGTTSYADSVKGRFTISKDKAKDTFYLQMNSLKPEDTAMYSCKAYGYDENYYAMDYWGQGTSVTVS

SEQ ID NO: 2615 - protein, 118 aa, synthetic construct
VKLEESGGGSVQAGGSLRLSCTAPGFKRNSWGMDWYRQAPGKERDFVSSISRDGTTSYADSVKGRFTISKDKAKDTFYLQMNSLKPEDTAMYSCKAYGYDKNYFPMDYWGQGTSVTVS

SEQ ID NO: 2616 - protein, 118 aa, synthetic construct
VKLEESGGGSVQAGGSLRLSCTAPGFKRNSWGMDWYRQAPGKERDFVSSISRDGTTSYADSVKGRFTISKDKAKDTFYLQMNSLKPEDTAMYSCKAYGYDKNYYAMDYWGQGTSVTVS

SEQ ID NO: 2617 - protein, 118 aa, synthetic construct
VKLEESGGGSVQAGGSLRLSCTAPGFKRNSWGMDWYRQAPGKERDFVSSISRDGTTSYADSVKGRFTISKDKAKDTFYLQMNSLKPEDTAVYSCKAYGYDENYYAMAYWGQGTSVTVS

SEQ ID NO: 2618 - protein, 118 aa, synthetic construct
VKLEESGGGSVQAGGSLRLSCTAPGFKRNSWGMDWYRQAPGKERDFVSSISRDGTTSYADSVKGRFTISKDKAKDTFYLQMNSLKPEDTAVYSCKAYGYDENYYAMDYWGQGTSVTVS

SEQ ID NO: 2619 - protein, 118 aa, synthetic construct
VKLEESGGGSVQAGGSLRLSCTAPGFKRNSWGMDWYRQAPGKERDFVSSISRDGTTSYADSVKGRFTISKDKATDTFYLQMNSLKPEDTAMYSCKAYGYDKNYYAMDYWGQGTSVTVS

SEQ ID NO: 2620 - protein, 118 aa, synthetic construct
VKLEESGGGSVQAGGSLRLSCTAPGFKRNSWGMDWYRQAPGKERDFVSSISRDGTTSYADSVKGRFTISKDKATDTVYLQMNNLKPEDTAMYSCKAYGYDENYFPMDYWGQGTSVTVS

SEQ ID NO: 2621 - protein, 118 aa, synthetic construct
VKLEESGGGSVQAGGSLRLSCTAPGFKRNSWGMDWYRQAPGKERDFVSSISRDGTTSYADSVKGRFTISKDKATDTVYLQMNSLKPDDTAMYSCKAYGYDENYYARDYWGQGTSVTVS

SEQ ID NO: 2622 - protein, 118 aa, synthetic construct
VKLEESGGGSVQAGGSLRLSCTAPGFKRNSWGMDWYRQAPGKERDFVSSISRDGTTSYADSVKGRFTISKDKATDTVYLQMNSLKPEDSAMYSCKAYGYDENYFPMDYWGQGTSVTVS

SEQ ID NO: 2623 - protein, 118 aa, synthetic construct
VKLEESGGGSVQAGGSLRLSCTAPGFKRNSWGMDWYRQAPGKERDFVSSISRDGTTSYADSVKGRFTISKDKATDTVYLQMNSLKPEDSAMYSCKAYGYDENYYAMDYWGQGTSVTVS

SEQ ID NO: 2624 - protein, 118 aa, synthetic construct
VKLEESGGGSVQAGGSLRLSCTAPGFKRNSWGMDWYRQAPGKERDFVSSISRDGTTSYADSVKGRFTISKDKATDTVYLQMNSLKPEDTAMYLCKAYGYDENYFAMDYWGQGTSVTVS

SEQ ID NO: 2625 - protein, 118 aa, synthetic construct
VKLEESGGGSVQAGGSLRLSCTAPGFKRNSWGMDWYRQAPGKERDFVSSISRDGTTSYADSVKGRFTISKDKATDTVYLQMNSLKPEDTAMYSCKAYGYDENYFAMDYWGQGTSVTVS

SEQ ID NO: 2626 - protein, 118 aa, synthetic construct
VKLEESGGGSVQAGGSLRLSCTAPGFKRNSWGMDWYRQAPGKERDFVSSISRDGTTSYADSVKGRFTISKDKATDTVYLQMNSLKPEDTAMYSCKAYGYDENYFPMDYWGQGTSVTVS

SEQ ID NO: 2627 - protein, 118 aa, synthetic construct
VKLEESGGGSVQAGGSLRLSCTAPGFKRNSWGMDWYRQAPGKERDFVSSISRDGTTSYADSVKGRFTISKDKATDTVYLQMNSLKPEDTAMYSCKAYGYDENYLPMDYWGQGTSVTVS

SEQ ID NO: 2628 - protein, 118 aa, synthetic construct
VKLEESGGGSVQAGGSLRLSCTAPGFKRNSWGMDWYRQAPGKERDFVSSISRDGTTSYADSVKGRFTISKDKATDTVYLQMNSLKPEDTAMYSCKAYGYDENYYAMAYWGQGTSVTVS

SEQ ID NO: 2629 - protein, 118 aa, synthetic construct
VKLEESGGGSVQAGGSLRLSCTAPGFKRNSWGMDWYRQAPGKERDFVSSISRDGTTSYADSVKGRFTISKDKATDTVYLQMNSLKPEDTAMYSCKAYGYDENYYAMDYWGQGTSVTVS

SEQ ID NO: 2630 - protein, 118 aa, synthetic construct
VKLEESGGGSVQAGGSLRLSCTAPGFKRNSWGMDWYRQAPGKERDFVSSISRDGTTSYADSVKGRFTISKDKATDTVYLQMNSLKPEDTAMYSCKAYGYDENYYARDYWGQGTSVTVS

SEQ ID NO: 2631 - protein, 118 aa, synthetic construct
VKLEESGGGSVQAGGSLRLSCTAPGFKRNSWGMDWYRQAPGKERDFVSSISRDGTTSYADSVKGRFTISKDKATDTVYLQMNSLKPEDTAMYSCKAYGYDENYYFMDYWGQGTSVTVS

SEQ ID NO: 2632 - protein, 118 aa, synthetic construct
VKLEESGGGSVQAGGSLRLSCTAPGFKRNSWGMDWYRQAPGKERDFVSSISRDGTTSYADSVKGRFTISKDKATDTVYLQMNSLKPEDTAMYSCKAYGYDKNYYAMDYWGQGTSVTVS

SEQ ID NO: 2633 - protein, 118 aa, synthetic construct
VKLEESGGGSVQAGGSLRLSCTAPGFKRNSWGMDWYRQAPGKERDFVSSISRDGTTSYADSVKGRFTISKDKATDTVYLQMNSLKPEDTAVYSCKAYGYDENYYAMAYWGQGTSVTVS

SEQ ID NO: 2634 - protein, 118 aa, synthetic construct
VKLEESGGGSVQAGGSLRLSCTAPGFKRNSWGMDWYRQAPGKEREFVASISADGTTSYADSVKGRFTISKDKAKDTFYLQMNSLKPEDSAMYSCKAYGYDENYYAMDYWGQGTSVTVS

SEQ ID NO: 2635 - protein, 118 aa, synthetic construct
VKLEESGGGSVQAGGSLRLSCTAPGFKRNSWGMDWYRQAPGKEREFVSSIDRDGTTSYADSVKGRFTISKDKATDTVYLQMNSLKPEDTAMYSCKAYGYDENYFPMDYWGQGTSVTVS

SEQ ID NO: 2636 - protein, 118 aa, synthetic construct
VKLEESGGGSVQAGGSLRLSCTAPGFKRNSWGMDWYRQAPGKEREFVSSISADGTTSYADSVKGRFTISKDKAKDTFYLQMNNLKPEDTAMYSCKAYGYDENYFPMDYWGQGTSVTVS

SEQ ID NO: 2637 - protein, 118 aa, synthetic construct
VKLEESGGGSVQAGGSLRLSCTAPGFKRNSWGMDWYRQAPGKEREFVSSISADGTTSYADSVKGRFTISKDKAKDTFYLQMNNLKPEDTAMYSCKAYGYDENYYAMDYWGQGTSVTVS

SEQ ID NO: 2638 - protein, 118 aa, synthetic construct
VKLEESGGGSVQAGGSLRLSCTAPGFKRNSWGMDWYRQAPGKEREFVSSISADGTTSYADSVKGRFTISKDKAKDTFYLQMNSLKPEDTAMYSCKAYGYDENYFPMDYWGQGTSVTVS

SEQ ID NO: 2639 - protein, 118 aa, synthetic construct
VKLEESGGGSVQAGGSLRLSCTAPGFKRNSWGMDWYRQAPGKEREFVSSISADGTTSYADSVKGRFTISKDKAKDTFYLQMNSLKPEDTAMYSCKAYGYDENYYAMDYWGQGTSVTVS

SEQ ID NO: 2640 - protein, 118 aa, synthetic construct
VKLEESGGGSVQAGGSLRLSCTAPGFKRNSWGMDWYRQAPGKEREFVSSISADGTTSYADSVKGRFTISKDKAKDTFYLQMNSLKPEDTAVYSCKAYGYDENYYAMAYWGQGTSVTVS

SEQ ID NO: 2641 - protein, 118 aa, synthetic construct
VKLEESGGGSVQAGGSLRLSCTAPGFKRNSWGMDWYRQAPGKEREFVSSISADGTTSYADSVKGRFTISKDKATDTVYLQMNSLKPEDTAMYSCKAYGYDENYFPMDYWGQGTSVTVS

SEQ ID NO: 2642 - protein, 118 aa, synthetic construct
VKLEESGGGSVQAGGSLRLSCTAPGFKRNSWGMDWYRQAPGKEREFVSSISPDGTTSYADSVKGRFTISKDKATDTVYLQMNSLKPEDTAMYSCKAYGYDENYFPMDYWGQGTSVTVS

SEQ ID NO: 2643 - protein, 118 aa, synthetic construct
VKLEESGGGSVQAGGSLRLSCTAPGFKRNSWGMDWYRQAPGKEREFVSSISRDGTTSYADSVKGRFTISKDKAKDTFYLQMNNLKPEDTAMYSCKAYGYDENYYAMDYWGQGTSVTVS

SEQ ID NO: 2644 - protein, 118 aa, synthetic construct
VKLEESGGGSVQAGGSLRLSCTAPGFKRNSWGMDWYRQAPGKEREFVSSISRDGTTSYADSVKGRFTISKDKAKDTFYLQMNSLKPEDSAMYSCKAYGYDENYYAMDYWGQGTSVTVS

SEQ ID NO: 2645 - protein, 118 aa, synthetic construct
VKLEESGGGSVQAGGSLRLSCTAPGFKRNSWGMDWYRQAPGKEREFVSSISRDGTTSYADSVKGRFTISKDKAKDTFYLQMNSLKPEDTAMYSCKAYGYDKNYYAMDYWGQGTSVTVS

SEQ ID NO: 2646 - protein, 118 aa, synthetic construct
VKLEESGGGSVQAGGSLRLSCTAPGFKRNSWGMDWYRQAPGKEREFVSSISRDGTTSYADSVKGRFTISKDKATDTVYLQMNSLKPEDTAMYSCKAYGYDENYFPMDYWGQGTSVTVS

SEQ ID NO: 2647 - protein, 118 aa, synthetic construct
VKLEESGGGSVQAGGSLRLSCTAPGFKRNSWGMDWYRQAPGKEREFVSSISRDGTTSYADSVKGRFTISKDKATDTVYLQMNSLKPEDTAMYSCKAYGYDENYYAMDYWGQGTSVTVS

SEQ ID NO: 2648 - protein, 118 aa, synthetic construct
VKLEESGGGSVQAGGSLRLSCTAPGFKSNRYGMDWYRQAPGKERDFVSSISRDGTTSYADSVKGRFTISKDKATDTVYLQMNSLKPEDTAMYSCKAYGYDENYFPMDYWGQGTSVTVS

SEQ ID NO: 2649 - protein, 118 aa, synthetic construct
VKLEESGGGSVQAGGSLRLSCTAPGFKSNRYGMDWYRQAPGKEREFVSSISRDGTTSYADSVKGRFTISKDKATDTVYLQMNSLKPEDTAMYSCKAYGYDENYFPMDYWGQGTSVTVS

SEQ ID NO: 2650 - protein, 118 aa, synthetic construct
VKLEESGGGSVQAGGSLRLSCTAPGFKSNRYGMDWYRQAPGKEREFVSSISTDGTISYADSVKGRFIISKDKAKDTVYLQMNSLKPEDTAIYSCKAYGYDENYYARDYWGQGTSVTVS

SEQ ID NO: 2651 - protein, 118 aa, synthetic construct
VKLEESGGGSVQAGGSLRLSCTAPGFKSNRYGMDWYRQAPGKEREFVSSISTDGTISYADSVKGRFTISKDKATDTVYLQMNSLKPEDTAMYSCKAYGYDENYYAMDYWGQGTSVTVS

SEQ ID NO: 2652 - protein, 118 aa, synthetic construct
VKLEESGGGSVQAGGSLRLSCTAPGFKSNSCGMDWYRQAPGKEREFVSSISADGTTSYADSVKGRFTISKDKATDTVYLQMNSLKPEDTAMYSCKAYGYDENYFPMDYWGQGTSVTVS

SEQ ID NO: 2653 - protein, 118 aa, synthetic construct
VKLEESGGGSVQAGGSLRLSCTAPGFKSNSCGMDWYRQAPGKEREFVSSISPDGTTSYADSVKGRFTISKDKATDTVYLQMNSLKPEDTAMYSCKAYGYDENYFPMDYWGQGTSVTVS

SEQ ID NO: 2654 - protein, 118 aa, synthetic construct
VKLEESGGGSVQAGGSLRLSCTAPGFKSNSWGMDWYRQAPGKERDFVSSISADGTTSYADSVKGRFTISKDKAKDTFYLQMNSLKPEDSAMYSCKAYGYDENYYAMDYWGQGTSVTVS

SEQ ID NO: 2655 - protein, 118 aa, synthetic construct
VKLEESGGGSVQAGGSLRLSCTAPGFKSNSWGMDWYRQAPGKERDFVSSISADGTTSYADSVKGRFTISKDKAKDTFYLQMNSLKPEDTAMYSCKAYGYDENYFPMDYWGQGTSVTVS

SEQ ID NO: 2656 - protein, 118 aa, synthetic construct
VKLEESGGGSVQAGGSLRLSCTAPGFKSNSWGMDWYRQAPGKERDFVSSISADGTTSYADSVKGRFTISKDKAKDTFYLQMNSLKPEDTAMYSCKAYGYDENYYAMDYWGQGTSVTVS

SEQ ID NO: 2657 - protein, 118 aa, synthetic construct
VKLEESGGGSVQAGGSLRLSCTAPGFKSNSWGMDWYRQAPGKERDFVSSISADGTTSYADSVKGRFTISKDKAKDTFYLQMNSLKPEDTAVYSCKAYGYDENYYAMAYWGQGTSVTVS

SEQ ID NO: 2658 - protein, 118 aa, synthetic construct
VKLEESGGGSVQAGGSLRLSCTAPGFKSNSWGMDWYRQAPGKERDFVSSISADGTTSYADSVKGRFTISKDKATDTVYLQMNSLKPEDTAMYSCKAYGYDENYFPMDYWGQGTSVTVS

SEQ ID NO: 2659 - protein, 118 aa, synthetic construct
VKLEESGGGSVQAGGSLRLSCTAPGFKSNSWGMDWYRQAPGKERDFVSSISPDGTTSYADSVKGRFTISKDKAKATVYLQMNSLKPDDTAMYSCKAYGYDENYYAMDYWGQGTSVTVS

SEQ ID NO: 2660 - protein, 118 aa, synthetic construct
VKLEESGGGSVQAGGSLRLSCTAPGFKSNSWGMDWYRQAPGKERDFVSSISPDGTTSYADSVKGRFTISKDKAKDTFYLQMNSLKPEDTAMYSCKAYGYDKNYFPMDYWGQGTSVTVS

SEQ ID NO: 2661 - protein, 118 aa, synthetic construct
VKLEESGGGSVQAGGSLRLSCTAPGFKSNSWGMDWYRQAPGKERDFVSSISRDGTTSYADSVKGRFTISKDKAKATVYLQMNSLKPDDTAMYSCKAYGYDENYFPMDYWGQGTSVTVS

SEQ ID NO: 2662 - protein, 118 aa, synthetic construct
VKLEESGGGSVQAGGSLRLSCTAPGFKSNSWGMDWYRQAPGKERDFVSSISRDGTTSYADSVKGRFTISKDKAKATVYLQMNSLKPDDTAMYSCKAYGYDENYYFMDYWGQGTSVTVS

SEQ ID NO: 2663 - protein, 118 aa, synthetic construct
VKLEESGGGSVQAGGSLRLSCTAPGFKSNSWGMDWYRQAPGKERDFVSSISRDGTTSYADSVKGRFTISKDKAKDTFYLQMNNLKPEDTAMYLCKAYGYDENYFAMDYWGQGTSVTVS

SEQ ID NO: 2664 - protein, 118 aa, synthetic construct
VKLEESGGGSVQAGGSLRLSCTAPGFKSNSWGMDWYRQAPGKERDFVSSISRDGTTSYADSVKGRFTISKDKAKDTFYLQMNNLKPEDTAMYSCKAYGYDENYYAMDYWGQGTSVTVS

SEQ ID NO: 2665 - protein, 118 aa, synthetic construct
VKLEESGGGSVQAGGSLRLSCTAPGFKSNSWGMDWYRQAPGKERDFVSSISRDGTTSYADSVKGRFTISKDKAKDTFYLQMNSLKPEDSAMYSCKAYGYDENYFPMDYWGQGTSVTVS

SEQ ID NO: 2666 - protein, 118 aa, synthetic construct
VKLEESGGGSVQAGGSLRLSCTAPGFKSNSWGMDWYRQAPGKERDFVSSISRDGTTSYADSVKGRFTISKDKAKDTFYLQMNSLKPEDSAMYSCKAYGYDENYYAMDYWGQGTSVTVS

SEQ ID NO: 2667 - protein, 118 aa, synthetic construct
VKLEESGGGSVQAGGSLRLSCTAPGFKSNSWGMDWYRQAPGKERDFVSSISRDGTTSYADSVKGRFTISKDKAKDTFYLQMNSLKPEDTAMYSCKAYGYDENYFPMDYWGQGTSVTVS

SEQ ID NO: 2668 - protein, 118 aa, synthetic construct
VKLEESGGGSVQAGGSLRLSCTAPGFKSNSWGMDWYRQAPGKERDFVSSISRDGTTSYADSVKGRFTISKDKAKDTFYLQMNSLKPEDTAMYSCKAYGYDENYYAMDYWGQGTSVTVS

SEQ ID NO: 2669 - protein, 118 aa, synthetic construct
VKLEESGGGSVQAGGSLRLSCTAPGFKSNSWGMDWYRQAPGKERDFVSSISRDGTTSYADSVKGRFTISKDKAKDTFYLQMNSLKPEDTAMYSCKAYGYDKNYYAMDYWGQGTSVTVS

SEQ ID NO: 2670 - protein, 118 aa, synthetic construct
VKLEESGGGSVQAGGSLRLSCTAPGFKSNSWGMDWYRQAPGKERDFVSSISRDGTTSYADSVKGRFTISKDKAKDTFYLQMNSLKPEDTAVYSCKAYGYDENYYAMAYWGQGTSVTVS

SEQ ID NO: 2671 - protein, 118 aa, synthetic construct
VKLEESGGGSVQAGGSLRLSCTAPGFKSNSWGMDWYRQAPGKERDFVSSISRDGTTSYADSVKGRFTISKDKATDTVYLQMNNLKPEDTAMYSCKAYGYDENYYAMDYWGQGTSVTVS

SEQ ID NO: 2672 - protein, 118 aa, synthetic construct
VKLEESGGGSVQAGGSLRLSCTAPGFKSNSWGMDWYRQAPGKERDFVSSISRDGTTSYADSVKGRFTISKDKATDTVYLQMNSLKPDDTAMYSCKAYGYDENYYFMDYWGQGTSVTVS

SEQ ID NO: 2673 - protein, 118 aa, synthetic construct
VKLEESGGGSVQAGGSLRLSCTAPGFKSNSWGMDWYRQAPGKERDFVSSISRDGTTSYADSVKGRFTISKDKATDTVYLQMNSLKPEDSAMYSCKAYGYDENYYAMDYWGQGTSVTVS

SEQ ID NO: 2674 - protein, 118 aa, synthetic construct
VKLEESGGGSVQAGGSLRLSCTAPGFKSNSWGMDWYRQAPGKERDFVSSISRDGTTSYADSVKGRFTISKDKATDTVYLQMNSLKPEDTAMYSCKAYGYDENYFAMDYWGQGTSVTVS

SEQ ID NO: 2675 - protein, 118 aa, synthetic construct
VKLEESGGGSVQAGGSLRLSCTAPGFKSNSWGMDWYRQAPGKERDFVSSISRDGTTSYADSVKGRFTISKDKATDTVYLQMNSLKPEDTAMYSCKAYGYDENYFPMDYWGPGTSVTVS

SEQ ID NO: 2676 - protein, 118 aa, synthetic construct
VKLEESGGGSVQAGGSLRLSCTAPGFKSNSWGMDWYRQAPGKERDFVSSISRDGTTSYADSVKGRFTISKDKATDTVYLQMNSLKPEDTAMYSCKAYGYDENYFPMDYWGQGTSVTVS

SEQ ID NO: 2677 - protein, 118 aa, synthetic construct
VKLEESGGGSVQAGGSLRLSCTAPGFKSNSWGMDWYRQAPGKERDFVSSISRDGTTSYADSVKGRFTISKDKATDTVYLQMNSLKPEDTAMYSCKAYGYDENYLPMDYWGQGTSVTVS

SEQ ID NO: 2678 - protein, 118 aa, synthetic construct
VKLEESGGGSVQAGGSLRLSCTAPGFKSNSWGMDWYRQAPGKERDFVSSISRDGTTSYADSVKGRFTISKDKATDTVYLQMNSLKPEDTAMYSCKAYGYDENYYAMAYWGQGTSVTVS

SEQ ID NO: 2679 - protein, 118 aa, synthetic construct
VKLEESGGGSVQAGGSLRLSCTAPGFKSNSWGMDWYRQAPGKERDFVSSISRDGTTSYADSVKGRFTISKDKATDTVYLQMNSLKPEDTAMYSCKAYGYDENYYAMDYWGQGTSVTVS

SEQ ID NO: 2680 - protein, 118 aa, synthetic construct
VKLEESGGGSVQAGGSLRLSCTAPGFKSNSWGMDWYRQAPGKERDFVSSISRDGTTSYADSVKGRFTISKDKATDTVYLQMNSLKPEDTAMYSCKAYGYDENYYFMDYWGQGTSVTVS

SEQ ID NO: 2681 - protein, 118 aa, synthetic construct
VKLEESGGGSVQAGGSLRLSCTAPGFKSNSWGMDWYRQAPGKERDFVSSISRDGTTSYADSVKGRFTISKDKATDTVYLQMNSLKPEDTAMYSCKAYGYDKNYYAMDYWGQGTSVTVS

SEQ ID NO: 2682 - protein, 118 aa, synthetic construct
VKLEESGGGSVQAGGSLRLSCTAPGFKSNSWGMDWYRQAPGKERDFVSSISRDGTTSYADSVKGRFTISKDKATDTVYLQMNSLKPEDTAVYSCKAYGYDENYYAMAYWGQGTSVTVS

SEQ ID NO: 2683 - protein, 118 aa, synthetic construct
VKLEESGGGSVQAGGSLRLSCTAPGFKSNSWGMDWYRQAPGKEREFVSSISADGTTSYADSVKGRFTISKDKAKDTFYLQMNSLKPEDSAMYSCKAYGYDENYYAMDYWGQGTSVTVS

SEQ ID NO: 2684 - protein, 118 aa, synthetic construct
VKLEESGGGSVQAGGSLRLSCTAPGFKSNSWGMDWYRQAPGKEREFVSSISADGTTSYADSVKGRFTISKDKATDTVYLQMNSLKPEDTAMYSCKAYGYDENYFPMDYWGQGTSVTVS

SEQ ID NO: 2685 - protein, 118 aa, synthetic construct
VKLEESGGGSVQAGGSLRLSCTAPGFKSNSWGMDWYRQAPGKEREFVSSISADGTTSYADSVKGRFTISKDKATDTVYLQMNSLKPEDTAMYSCKAYGYDENYYAMDYWGQGTSVTVS

SEQ ID NO: 2686 - protein, 118 aa, synthetic construct
VKLEESGGGSVQAGGSLRLSCTAPGFKSNSWGMDWYRQAPGKEREFVSSISPDGTTSYADSVKGRFTISKDKAKATVYLQMNSLKPDDTAMYSCKAYGYDENYFPMDYWGQGTSVTVS

SEQ ID NO: 2687 - protein, 118 aa, synthetic construct
VKLEESGGGSVQAGGSLRLSCTAPGFKSNSWGMDWYRQAPGKEREFVSSISPDGTTSYADSVKGRFTISKDKAKATVYLQMNSLKPDDTAMYSCKAYGYDENYYFMDYWGQGTSVTVS

SEQ ID NO: 2688 - protein, 118 aa, synthetic construct
VKLEESGGGSVQAGGSLRLSCTAPGFKSNSWGMDWYRQAPGKEREFVSSISRDGTTSYADSVKGRFTISKDKATDTVYLQMNSLKPEDTAMYSCKAYGYDENYFPMDYWGQGTSVTVS

SEQ ID NO: 2689 - protein, 118 aa, synthetic construct
VKLEESGGGSVQAGGSLRLSCTAPGFKSNSWGMDWYRQAPGKEREFVSSISRDGTTSYADSVKGRFTISKDKATDTVYLQMNSLKPEDTAMYSCKAYGYDENYYAMDYWGQGTSVTVS

SEQ ID NO: 2690 - protein, 118 aa, synthetic construct
VKLEESGGGSVQAGGSLRLSCTAPGFRSNSCGMDWYRQAPGKERDFVSSISRDGTTSYADSVKGRFTISKDKATDTVYLQMNSLKPEDTAMYSCKAYGYDENYFPMDYWGQGTSVTVS

SEQ ID NO: 2691 - protein, 118 aa, synthetic construct
VKLEESGGGSVQAGGSLRLSCTAPGFRSNSCGMDWYRQAPGKERDFVSSISRDGTTSYADSVKGRFTISKDKATDTVYLQMNSLKPEDTAMYSCKAYGYDENYYAMDYWGQGTSVTVS

SEQ ID NO: 2692 - protein, 118 aa, synthetic construct
VKLEESGGGSVQAGGSLRLSCTAPGFRSNSCGMDWYRQAPGKEREFVASISADGTTSYADSVKGRFTISKDKATDTVYLQMNSLKPEDTAMYSCKAYGYDENYFPMDYWGQGTSVTVS

SEQ ID NO: 2693 - protein, 118 aa, synthetic construct
VKLEESGGGSVQAGGSLRLSCTAPGFRSNSCGMDWYRQAPGKEREFVSSIDRDGTTSYADSVKGRFTISKDKATDTVYLQMNSLKPEDTAMYSCKAYGYDENYFPMDYWGQGTSVTVS

SEQ ID NO: 2694 - protein, 118 aa, synthetic construct
VKLEESGGGSVQAGGSLRLSCTAPGFRSNSCGMDWYRQAPGKEREFVSSISADGTTSYADSVKGRFTISKDKATDTVYLQMNSLKPEDTAMYSCKAYGYDENYFPMDYWGQGTSVTVS

SEQ ID NO: 2695 - protein, 118 aa, synthetic construct
VKLEESGGGSVQAGGSLRLSCTAPGFRSNSCGMDWYRQAPGKEREFVSSISPDGTTSYADSVKGRFTISKDKATDTVYLQMNSLKPEDTAMYSCKAYGYDENYFPMDYWGQGTSVTVS

SEQ ID NO: 2696 - protein, 118 aa, synthetic construct
VKLEESGGGSVQAGGSLRLSCTAPGFRSNSCGMDWYRQAPGKEREFVSSISPDGTTSYADSVKGRFTISKDKATDTVYLQMNSLKPEDTAMYSCKAYGYDENYYAMDYWGQGTSVTVS

SEQ ID NO: 2697 - protein, 118 aa, synthetic construct
VKLEESGGGSVQAGGSLRLSCTAPGFRSNSCGMDWYRQAPGKEREFVSSISRDGTTSYADSVKGRFTISKDKATDTVYLQMNSLKPEDTAMYSCKAYGYDENYFPMDYWGQGTSVTVS

SEQ ID NO: 2698 - protein, 118 aa, synthetic construct
VKLEESGGGSVQAGGSLRLSCTAPGFRSNSWGMDWYRQAPGKERDFVSSISRDGTTSYADSVKGRFTISKDKATDTVYLQMNSLKPEDTAMYSCKAYGYDENYFPMDYWGQGTSVTVS

SEQ ID NO: 2699 - protein, 118 aa, synthetic construct
VKLEESGGGSVQAGGSLRLSCTAPGFRSNSWGMDWYRQAPGKERDFVSSISRDGTTSYADSVKGRFTISKDKATDTVYLQMNSLKPEDTAMYSCKAYGYDENYYAMDYWGQGTSVTVS

SEQ ID NO: 2700 - protein, 118 aa, synthetic construct
VKLEESGGGSVQAGGSLRLSCTAPGLRSNSCGMDWYRQALGKEREFVSSISPDGTTSYADSVKGRFTISKDKAKATVYLQMNSLKPDDTAMYSCKAYGYDENYFAMDYWGQGTSVTVS

SEQ ID NO: 2701 - protein, 118 aa, synthetic construct
VKLEESGGGSVQAGGSLRLSCTAPGLRSNSCGMDWYRQALGKEREFVSSISPDGTTSYADSVKGRFTISKDKAKATVYLQMNSLKPDDTAMYSCKAYGYDENYFPMDYWGQGTSVTVS

SEQ ID NO: 2702 - protein, 118 aa, synthetic construct
VKLEESGGGSVQAGGSLRLSCTAPGLRSNSCGMDWYRQALGKEREFVSSISPDGTTSYADSVKGRFTISKDKAKATVYLQMNSLKPDDTAMYSCKAYGYDENYYAMDYWGQGTSVTVS

SEQ ID NO: 2703 - protein, 118 aa, synthetic construct
VKLEESGGGSVQAGGSLRLSCTAPGLRSNSCGMDWYRQALGKEREFVSSISPDGTTSYADSVKGRFTISKDKAKATVYLQMNSLKPDDTAMYSCKAYGYDENYYFMDYWGQGTSVTVS

SEQ ID NO: 2704 - protein, 118 aa, synthetic construct
VKLEESGGGSVQAGGSLRLSCTAPGLRSNSCGMDWYRQALGKEREFVSSISPDGTTSYADSVKGRFTISKDKAKATVYLQMNSLKPEDSAMYSCKAYGYDENYYAMDYWGQGTSVTVS

SEQ ID NO: 2705 - protein, 118 aa, synthetic construct
VKLEESGGGSVQAGGSLRLSCTAPGLRSNSCGMDWYRQALGKEREFVSSISPDGTTSYADSVKGRFTISKDKAKATVYLQMNSLKPEDTAMYSCKAYGYDENYFPMDYWGQGTSVTVS

SEQ ID NO: 2706 - protein, 118 aa, synthetic construct
VKLEESGGGSVQAGGSLRLSCTAPGLRSNSCGMDWYRQALGKEREFVSSISPDGTTSYADSVKGRFTISKDKAKATVYLQMNSLKPEDTAMYSCKAYGYDENYYAMDYWGQGTSVTVS

SEQ ID NO: 2707 - protein, 118 aa, synthetic construct
VKLEESGGGSVQAGGSLRLSCTAPGLRSNSCGMDWYRQALGKEREFVSSISPDGTTSYADSVKGRFTISKDKAKDTVYLQMNSLKPEDTAMYSCKAYGYDENYFPMDYWGQGTSVTVS

SEQ ID NO: 2708 - protein, 118 aa, synthetic construct
VKLEESGGGSVQAGGSLRLSCTAPGLRSNSCGMDWYRQALGKEREFVSSISPDGTTSYADSVKGRFTISKDKATDTVYLQMNSLKPDDTAMYSCKAYGYDENYFPMDYWGQGTSVTVS

SEQ ID NO: 2709 - protein, 118 aa, synthetic construct
VKLEESGGGSVQAGGSLRLSCTAPGLRSNSCGMDWYRQALGKEREFVSSISPDGTTSYADSVKGRFTISKDKATDTVYLQMNSLKPEDTAMYSCKAYGYDENYFPMDYWGQGTSVTVS

SEQ ID NO: 2710 - protein, 118 aa, synthetic construct
VKLEESGGGSVQAGGSLRLSCTAPGLRSNSCGMDWYRQALGKEREFVSSISPDGTTSYADSVKGRFTISKDKATDTVYLQMNSLKPEDTAMYSCKAYGYDENYYAMDYWGQGTSVTVS

SEQ ID NO: 2711 - protein, 118 aa, synthetic construct
VKLEESGGGSVQAGGSLRLSCTAPGLRSNSCGMDWYRQALGKEREFVSSISPDGTTSYADSVKGRFTISKDKATDTVYLQMNSLKPEDTAVYSCKAYGYDENYYAMAYWGQGTSVTVS

SEQ ID NO: 2712 - protein, 118 aa, synthetic construct
VKLEESGGGSVQAGGSLRLSCTAPGLRSNSCGMDWYRQALGKEREFVSSISRDGTTSYADSVKGRFTISKDKATDTVYLQMNSLKPEDTAMYSCKAYGYDENYFPMDYWGQGTSVTVS

SEQ ID NO: 2713 - protein, 118 aa, synthetic construct
VKLEESGGGSVQAGGSLRLSCTAPGLRSNSCGMDWYRQAPGKERDFVSSISRDGTTSYADSVKGRFTISKDKAKATVYLQMNSLKPDDTAMYSCKAYGYDENYYAMDYWGQGTSVTVS

SEQ ID NO: 2714 - protein, 118 aa, synthetic construct
VKLEESGGGSVQAGGSLRLSCTAPGLRSNSCGMDWYRQAPGKERDFVSSISRDGTTSYADSVKGRFTISKDKAKDTFYLQMNNLKPEDTAMYSCKAYGYDENYYAMDYWGQGTSVTVS

SEQ ID NO: 2715 - protein, 118 aa, synthetic construct
VKLEESGGGSVQAGGSLRLSCTAPGLRSNSCGMDWYRQAPGKERDFVSSISRDGTTSYADSVKGRFTISKDKAKDTFYLQMNSLKPEDSAMYSCKAYGYDENYYAMDYWGQGTSVTVS

SEQ ID NO: 2716 - protein, 118 aa, synthetic construct
VKLEESGGGSVQAGGSLRLSCTAPGLRSNSCGMDWYRQAPGKERDFVSSISRDGTTSYADSVKGRFTISKDKAKDTFYLQMNSLKPEDTAMYSCKAYGYDENYFPMDYWGQGTSVTVS

SEQ ID NO: 2717 - protein, 118 aa, synthetic construct
VKLEESGGGSVQAGGSLRLSCTAPGLRSNSCGMDWYRQAPGKERDFVSSISRDGTTSYADSVKGRFTISKDKAKDTFYLQMNSLKPEDTAMYSCKAYGYDENYYAMDYWGQGTSVTVS

SEQ ID NO: 2718 - protein, 118 aa, synthetic construct
VKLEESGGGSVQAGGSLRLSCTAPGLRSNSCGMDWYRQAPGKERDFVSSISRDGTTSYADSVKGRFTISKDKATDTVYLQMNSLKPEDTAIYSCKAYGYDENYYARDYWGQGTSVTVS

SEQ ID NO: 2719 - protein, 118 aa, synthetic construct
VKLEESGGGSVQAGGSLRLSCTAPGLRSNSCGMDWYRQAPGKERDFVSSISRDGTTSYADSVKGRFTISKDKATDTVYLQMNSLKPEDTAMYSCKAYGYDENYFPMDYWGQGTSVTVS

SEQ ID NO: 2720 - protein, 118 aa, synthetic construct
VKLEESGGGSVQAGGSLRLSCTAPGLRSNSCGMDWYRQAPGKERDFVSSISRDGTTSYADSVKGRFTISKDKATDTVYLQMNSLKPEDTAMYSCKAYGYDENYYAMAYWGQGTSVTVS

SEQ ID NO: 2721 - protein, 118 aa, synthetic construct
VKLEESGGGSVQAGGSLRLSCTAPGLRSNSCGMDWYRQAPGKERDFVSSISRDGTTSYADSVKGRFTISKDKATDTVYLQMNSLKPEDTAMYSCKAYGYDENYYAMDYWGQGTSVTVS

SEQ ID NO: 2722 - protein, 118 aa, synthetic construct
VKLEESGGGSVQAGGSLRLSCTAPGLRSNSCGMDWYRQAPGKERDFVSSISRDGTTSYADSVKGRFTISKDKATDTVYLQMNSLKPEDTAMYSCKAYGYDENYYFMDYWGQGTSVTVS

SEQ ID NO: 2723 - protein, 118 aa, synthetic construct
VKLEESGGGSVQAGGSLRLSCTAPGLRSNSCGMDWYRQAPGKERDFVSSISRDGTTSYADSVKGRFTISKDKATDTVYLQMNSLKPEDTAMYSCKAYGYDKNYYAMDYWGQGTSVTVS

SEQ ID NO: 2724 - protein, 118 aa, synthetic construct
VKLEESGGGSVQAGGSLRLSCTAPGLRSNSCGMDWYRQAPGKEREFVASISADGTTSYADSVKGRFTISKDKAKATVYLQMNSLKPDDTAMYSCKAYGYDENYYFMDYWGQGTSVTVS

SEQ ID NO: 2725 - protein, 118 aa, synthetic construct
VKLEESGGGSVQAGGSLRLSCTAPGLRSNSCGMDWYRQAPGKEREFVASISADGTTSYADSVKGRFTISKDKATDTVYLQMNSLKPEDSAMYSCKAYGYDENYYAMDYWGQGTSVTVS

SEQ ID NO: 2726 - protein, 118 aa, synthetic construct
VKLEESGGGSVQAGGSLRLSCTAPGLRSNSCGMDWYRQAPGKEREFVASISADGTTSYADSVKGRFTISKDKATDTVYLQMNSLKPEDTAMYSCKAYGYDENYFPMDYWGQGTSVTVS

SEQ ID NO: 2727 - protein, 118 aa, synthetic construct
VKLEESGGGSVQAGGSLRLSCTAPGLRSNSCGMDWYRQAPGKEREFVASISADGTTSYADSVKGRFTISKDKATDTVYLQMNSLKPEDTAMYSCKAYGYDENYYAMDYWGQGTSVTVS

SEQ ID NO: 2728 - protein, 118 aa, synthetic construct
VKLEESGGGSVQAGGSLRLSCTAPGLRSNSCGMDWYRQAPGKEREFVASISADGTTSYADSVKGRFTISKDKATDTVYLQMNSLKPEDTAMYSCKAYGYDKNYYAMDYWGQGTSVTVS

SEQ ID NO: 2729 - protein, 118 aa, synthetic construct
VKLEESGGGSVQAGGSLRLSCTAPGLRSNSCGMDWYRQAPGKEREFVASISRDGTTSYADSVKGRFTISKDKATDTVYLQMNSLKPEDTAMYSCKAYGYDENYFPMDYWGQGTSVTVS

SEQ ID NO: 2730 - protein, 118 aa, synthetic construct
VKLEESGGGSVQAGGSLRLSCTAPGLRSNSCGMDWYRQAPGKEREFVSSIDRDGTTSYADSVKGRFTISKDKATDTVYLQMNSLKPEDTAMYSCKAYGYDENYFPMDYWGQGTSVTVS

SEQ ID NO: 2731 - protein, 118 aa, synthetic construct
VKLEESGGGSVQAGGSLRLSCTAPGLRSNSCGMDWYRQAPGKEREFVSSISADGTTSYADSVKGRFTISKDKAKATVYLQMNSLKPDDTAMYSCKAYGYDENYFPMDYWGQGTSVTVS

SEQ ID NO: 2732 - protein, 118 aa, synthetic construct
VKLEESGGGSVQAGGSLRLSCTAPGLRSNSCGMDWYRQAPGKEREFVSSISADGTTSYADSVKGRFTISKDKAKATVYLQMNSLKPDDTAMYSCKAYGYDENYYAMAYWGQGTSVTVS

SEQ ID NO: 2733 - protein, 118 aa, synthetic construct
VKLEESGGGSVQAGGSLRLSCTAPGLRSNSCGMDWYRQAPGKEREFVSSISADGTTSYADSVKGRFTISKDKAKATVYLQMNSLKPDDTAMYSCKAYGYDENYYAMDYWGQGTSVTVS

SEQ ID NO: 2734 - protein, 118 aa, synthetic construct
VKLEESGGGSVQAGGSLRLSCTAPGLRSNSCGMDWYRQAPGKEREFVSSISADGTTSYADSVKGRFTISKDKAKATVYLQMNSLKPDDTAMYSCKAYGYDENYYARDYWGQGTSVTVS

SEQ ID NO: 2735 - protein, 118 aa, synthetic construct
VKLEESGGGSVQAGGSLRLSCTAPGLRSNSCGMDWYRQAPGKEREFVSSISADGTTSYADSVKGRFTISKDKAKATVYLQMNSLKPDDTAMYSCKAYGYDENYYFMDYWGQGTSVTVS

SEQ ID NO: 2736 - protein, 118 aa, synthetic construct
VKLEESGGGSVQAGGSLRLSCTAPGLRSNSCGMDWYRQAPGKEREFVSSISADGTTSYADSVKGRFTISKDKAKATVYLQMNSLKPEDTAMYSCKAYGYDENYFPMDYWGQGTSVTVS

SEQ ID NO: 2737 - protein, 118 aa, synthetic construct
VKLEESGGGSVQAGGSLRLSCTAPGLRSNSCGMDWYRQAPGKEREFVSSISADGTTSYADSVKGRFTISKDKAKDTVYLQMNSLKPEDTAMYSCKAYGYDENYFPMDYWGQGTSVTVS

SEQ ID NO: 2738 - protein, 118 aa, synthetic construct
VKLEESGGGSVQAGGSLRLSCTAPGLRSNSCGMDWYRQAPGKEREFVSSISADGTTSYADSVKGRFTISKDKATDTVYLQMNNLKPEDTAMYSCKAYGYDENYYAMDYWGQGTSVTVS

SEQ ID NO: 2739 - protein, 118 aa, synthetic construct
VKLEESGGGSVQAGGSLRLSCTAPGLRSNSCGMDWYRQAPGKEREFVSSISADGTTSYADSVKGRFTISKDKATDTVYLQMNSLKPDDTAMYSCKAYGYDENYFPMDYWGQGTSVTVS

SEQ ID NO: 2740 - protein, 118 aa, synthetic construct
VKLEESGGGSVQAGGSLRLSCTAPGLRSNSCGMDWYRQAPGKEREFVSSISADGTTSYADSVKGRFTISKDKATDTVYLQMNSLKPDDTAMYSCKAYGYDENYYAMDYWGQGTSVTVS

SEQ ID NO: 2741 - protein, 118 aa, synthetic construct
VKLEESGGGSVQAGGSLRLSCTAPGLRSNSCGMDWYRQAPGKEREFVSSISADGTTSYADSVKGRFTISKDKATDTVYLQMNSLKPEDSAMYSCKAYGYDENYYAMDYWGQGTSVTVS

SEQ ID NO: 2742 - protein, 118 aa, synthetic construct
VKLEESGGGSVQAGGSLRLSCTAPGLRSNSCGMDWYRQAPGKEREFVSSISADGTTSYADSVKGRFTISKDKATDTVYLQMNSLKPEDTAMYLCKAYGYDENYFAMDYWGQGTSVTVS

SEQ ID NO: 2743 - protein, 118 aa, synthetic construct
VKLEESGGGSVQAGGSLRLSCTAPGLRSNSCGMDWYRQAPGKEREFVSSISADGTTSYADSVKGRFTISKDKATDTVYLQMNSLKPEDTAMYSCKAYGYDENYFAMDYWGQGTSVTVS

SEQ ID NO: 2744 - protein, 118 aa, synthetic construct
VKLEESGGGSVQAGGSLRLSCTAPGLRSNSCGMDWYRQAPGKEREFVSSISADGTTSYADSVKGRFTISKDKATDTVYLQMNSLKPEDTAMYSCKAYGYDENYFPMDYWGQGTSVTVS

SEQ ID NO: 2745 - protein, 118 aa, synthetic construct
VKLEESGGGSVQAGGSLRLSCTAPGLRSNSCGMDWYRQAPGKEREFVSSISADGTTSYADSVKGRFTISKDKATDTVYLQMNSLKPEDTAMYSCKAYGYDENYLAMDYWGQGTSVTVS

SEQ ID NO: 2746 - protein, 118 aa, synthetic construct
VKLEESGGGSVQAGGSLRLSCTAPGLRSNSCGMDWYRQAPGKEREFVSSISADGTTSYADSVKGRFTISKDKATDTVYLQMNSLKPEDTAMYSCKAYGYDENYLPMDYWGQGTSVTVS

SEQ ID NO: 2747 - protein, 118 aa, synthetic construct
VKLEESGGGSVQAGGSLRLSCTAPGLRSNSCGMDWYRQAPGKEREFVSSISADGTTSYADSVKGRFTISKDKATDTVYLQMNSLKPEDTAMYSCKAYGYDENYYAMAYWGQGTSVTVS

SEQ ID NO: 2748 - protein, 118 aa, synthetic construct
VKLEESGGGSVQAGGSLRLSCTAPGLRSNSCGMDWYRQAPGKEREFVSSISADGTTSYADSVKGRFTISKDKATDTVYLQMNSLKPEDTAMYSCKAYGYDENYYAMDYWGQGTSVTVS

SEQ ID NO: 2749 - protein, 118 aa, synthetic construct
VKLEESGGGSVQAGGSLRLSCTAPGLRSNSCGMDWYRQAPGKEREFVSSISADGTTSYADSVKGRFTISKDKATDTVYLQMNSLKPEDTAMYSCKAYGYDENYYARDYWGQGTSVTVS

SEQ ID NO: 2750 - protein, 118 aa, synthetic construct
VKLEESGGGSVQAGGSLRLSCTAPGLRSNSCGMDWYRQAPGKEREFVSSISADGTTSYADSVKGRFTISKDKATDTVYLQMNSLKPEDTAMYSCKAYGYDENYYFMDYWGQGTSVTVS

SEQ ID NO: 2751 - protein, 118 aa, synthetic construct
VKLEESGGGSVQAGGSLRLSCTAPGLRSNSCGMDWYRQAPGKEREFVSSISADGTTSYADSVKGRFTISKDKATDTVYLQMNSLKPEDTAMYSCKAYGYDKNYYAMDYWGQGTSVTVS

SEQ ID NO: 2752 - protein, 118 aa, synthetic construct
VKLEESGGGSVQAGGSLRLSCTAPGLRSNSCGMDWYRQAPGKEREFVSSISADGTTSYADSVKGRFTISKDKATDTVYLQMNSLKPEDTAVYSCKAYGYDENYYAMAYWGQGTSVTVS

SEQ ID NO: 2753 - protein, 110 aa, synthetic construct
VKLEESGGGSVQAGGSLRLSCTAPGLRSNSCGMDWYRQAPGKEREFVSSISADGTTSYADSVKGRFTISKDKATDTVYLQMNSLKPEDTAVYYCAADWPPGGQGTLVTVS

SEQ ID NO: 2754 - protein, 118 aa, synthetic construct
VKLEESGGGSVQAGGSLRLSCTAPGLRSNSCGMDWYRQAPGKEREFVSSISPDGTTSYADSVKGRFTISKDKAKATVYLQMNSLKPDDTAMYSCKAYGYDENYFPMDYWGQGTSVTVS

SEQ ID NO: 2755 - protein, 118 aa, synthetic construct
VKLEESGGGSVQAGGSLRLSCTAPGLRSNSCGMDWYRQAPGKEREFVSSISPDGTTSYADSVKGRFTISKDKAKATVYLQMNSLKPDDTAMYSCKAYGYDENYYAMDYWGQGTSVTVS

SEQ ID NO: 2756 - protein, 118 aa, synthetic construct
VKLEESGGGSVQAGGSLRLSCTAPGLRSNSCGMDWYRQAPGKEREFVSSISPDGTTSYADSVKGRFTISKDKAKATVYLQMNSLKPDDTAMYSCKAYGYDENYYFMDYWGQGTSVTVS

SEQ ID NO: 2757 - protein, 118 aa, synthetic construct
VKLEESGGGSVQAGGSLRLSCTAPGLRSNSCGMDWYRQAPGKEREFVSSISPDGTTSYADSVKGRFTISKDKAKATVYLQMNSLKPDDTAMYSCKAYGYDKNYYAMDYWGQGTSVTVS

SEQ ID NO: 2758 - protein, 118 aa, synthetic construct
VKLEESGGGSVQAGGSLRLSCTAPGLRSNSCGMDWYRQAPGKEREFVSSISPDGTTSYADSVKGRFTISKDKAKATVYLQMNSLKPEDTAMYSCKAYGYDENYFPMDYWGQGTSVTVS

SEQ ID NO: 2759 - protein, 118 aa, synthetic construct
VKLEESGGGSVQAGGSLRLSCTAPGLRSNSCGMDWYRQAPGKEREFVSSISPDGTTSYADSVKGRFTISKDKAKATVYLQMNSLKPEDTAMYSCKAYGYDENYYAMDYWGQGTSVTVS

SEQ ID NO: 2760 - protein, 118 aa, synthetic construct
VKLEESGGGSVQAGGSLRLSCTAPGLRSNSCGMDWYRQAPGKEREFVSSISPDGTTSYADSVKGRFTISKDKATDTVYLQMNSLKPEDTAMYLCKAYGYDENYFAMDYWGQGTSVTVS

SEQ ID NO: 2761 - protein, 118 aa, synthetic construct
VKLEESGGGSVQAGGSLRLSCTAPGLRSNSCGMDWYRQAPGKEREFVSSISPDGTTSYADSVKGRFTISKDKATDTVYLQMNSLKPEDTAMYSCKAYGYDENYFPMDYWGQGTSVTVS

SEQ ID NO: 2762 - protein, 118 aa, synthetic construct
VKLEESGGGSVQAGGSLRLSCTAPGLRSNSCGMDWYRQAPGKEREFVSSISPDGTTSYADSVKGRFTISKDKATDTVYLQMNSLKPEDTAMYSCKAYGYDENYYAMAYWGQGTSVTVS

SEQ ID NO: 2763 - protein, 118 aa, synthetic construct
VKLEESGGGSVQAGGSLRLSCTAPGLRSNSCGMDWYRQAPGKEREFVSSISPDGTTSYADSVKGRFTISKDKATDTVYLQMNSLKPEDTAMYSCKAYGYDENYYAMDYWGQGTSVTVS

SEQ ID NO: 2764 - protein, 118 aa, synthetic construct
VKLEESGGGSVQAGGSLRLSCTAPGLRSNSCGMDWYRQAPGKEREFVSSISRDGTTSYADSVKGRFTISKDKATDTVYLQMNSLKPEDSAMYSCKAYGYDENYYAMDYWGQGTSVTVS

SEQ ID NO: 2765 - protein, 118 aa, synthetic construct
VKLEESGGGSVQAGGSLRLSCTAPGLRSNSCGMDWYRQAPGKEREFVSSISRDGTTSYADSVKGRFTISKDKATDTVYLQMNSLKPEDTAMYSCKAYGYDENYFPMDYWGQGTSVTVS

SEQ ID NO: 2766 - protein, 118 aa, synthetic construct
VKLEESGGGSVQAGGSLRLSCTAPGLRSNSCGMDWYRQAPGKEREFVSSISRDGTTSYADSVKGRFTISKDKATDTVYLQMNSLKPEDTAMYSCKAYGYDENYYAMDYWGQGTSVTVS

SEQ ID NO: 2767 - protein, 118 aa, synthetic construct
VKLEESGGGSVQAGGSLRLSCTAPGLRSNSCGMDWYRQAPGKEREFVSSISRDGTTSYADSVKGRFTISKDKATDTVYLQMNSLKPEDTAMYSCKAYGYDKNYYAMDYWGQGTSVTVS

SEQ ID NO: 2768 - protein, 118 aa, synthetic construct
VKLEESGGGSVQAGGSLRLSCTAPGLRSNSWGMDWYRQAPGKERDFVSSISRDGTTSYADSVKGRFTISKDKAKATVYLQMNSLKPDDTAMYSCKAYGYDENYYAMDYWGQGTSVTVS

SEQ ID NO: 2769 - protein, 118 aa, synthetic construct
VKLEESGGGSVQAGGSLRLSCTAPGLRSNSWGMDWYRQAPGKERDFVSSISRDGTTSYADSVKGRFTISKDKAKDTFYLQMNSLKPEDTAMYSCKAYGYDENYFPMDYWGQGTSVTVS

SEQ ID NO: 2770 - protein, 118 aa, synthetic construct
VKLEESGGGSVQAGGSLRLSCTAPGLRSNSWGMDWYRQAPGKERDFVSSISRDGTTSYADSVKGRFTISKDKAKDTFYLQMNSLKPEDTAMYSCKAYGYDENYYAMDYWGQGTSVTVS

SEQ ID NO: 2771 - protein, 118 aa, synthetic construct
VKLEESGGGSVQAGGSLRLSCTAPGLRSNSWGMDWYRQAPGKERDFVSSISRDGTTSYADSVKGRFTISKDKAKDTFYLQMNSLKPEDTAVYSCKAYGYDENYYAMAYWGQGTSVTVS

SEQ ID NO: 2772 - protein, 118 aa, synthetic construct
VKLEESGGGSVQAGGSLRLSCTAPGLRSNSWGMDWYRQAPGKERDFVSSISRDGTTSYADSVKGRFTISKDKATDTVYLQMNSLKPEDSAMYSCKAYGYDENYYAMDYWGQGTSVTVS

SEQ ID NO: 2773 - protein, 118 aa, synthetic construct
VKLEESGGGSVQAGGSLRLSCTAPGLRSNSWGMDWYRQAPGKERDFVSSISRDGTTSYADSVKGRFTISKDKATDTVYLQMNSLKPEDTAMYSCKAYGYDENYFPMDYWGQGTSVTVS

SEQ ID NO: 2774 - protein, 118 aa, synthetic construct
VKLEESGGGSVQAGGSLRLSCTAPGLRSNSWGMDWYRQAPGKERDFVSSISRDGTTSYADSVKGRFTISKDKATDTVYLQMNSLKPEDTAMYSCKAYGYDENYYAMDYWGQGTSVTVS

SEQ ID NO: 2775 - protein, 118 aa, synthetic construct
VKLEESGGGSVQAGGSLRLSCTAPGLRSNSWGMDWYRQAPGKEREFVSSISTDGTISYADSVKGRFIISKDKAKDTVYLQMNSLKPEDTAMYLCKAYGYDENYYAMDYWGQGTSVTVS

SEQ ID NO: 2776 - protein, 118 aa, synthetic construct
VKLEESGGGSVQAGGSLRLTCTAPGFKRNSWGMDWYRQAPGKEREFVSSISRDGTTSYADSVKGRFTISKDKATDTVYLQMNSLKPEDTAMYSCKAYGYDENYFPMDYWGQGTSVTVS

SEQ ID NO: 2777 - protein, 118 aa, synthetic construct
VKLEESGGGSVQAGGSLRLTCTAPGFKSNSWGMDWYRQAPGKERDFVSSISRDGTTSYADSVKGRFTISKDKATDTVYLQMNSLKPEDTAMYSCKAYGYDENYFPMDYWGQGTSVTVS

SEQ ID NO: 2778 - protein, 118 aa, synthetic construct
VKLEESGGGSVQAGGSLRLTCTAPGFKSNSWGMDWYRQAPGKERDFVSSISRDGTTSYADSVKGRFTISKDKATDTVYLQMNSLKPEDTAMYSCKAYGYDENYYAMDYWGQGTSVTVS

SEQ ID NO: 2779 - protein, 118 aa, synthetic construct
VKLEESGGGSVQAGGSLRLTCTAPGFRSNSCGMDWYRQAPGKERDFVSSISRDGTTSYADSVKGRFTISKDKATDTVYLQMNSLKPEDTAMYSCKAYGYDENYFPMDYWGQGTSVTVS

SEQ ID NO: 2780 - protein, 118 aa, synthetic construct
VKLEESGGGSVQAGGSLRLTCTAPGFRSNSCGMDWYRQAPGKEREFVSSISADGTTSYADSVKGRFTISKDKATDTVYLQMNSLKPEDTAMYSCKAYGYDENYFPMDYWGQGTSVTVS

SEQ ID NO: 2781 - protein, 118 aa, synthetic construct
VKLEESGGGSVQAGGSLRLTCTAPGFRSNSCGMDWYRQAPGKEREFVSSISADGTTSYADSVKGRFTISKDKATDTVYLQMNSLKPEDTAMYSCKAYGYDENYYAMDYWGQGTSVTVS

SEQ ID NO: 2782 - protein, 118 aa, synthetic construct
VKLEESGGGSVQAGGSLRLTCTAPGFRSNSCGMDWYRQAPGKEREFVSSISPDGTTSYADSVKGRFTISKDKAKATVYLQMNSLKPDDTAMYSCKAYGYDENYYAMDYWGQGTSVTVS

SEQ ID NO: 2783 - protein, 118 aa, synthetic construct
VKLEESGGGSVQAGGSLRLTCTAPGFRSNSCGMDWYRQAPGKEREFVSSISPDGTTSYADSVKGRFTISKDKATDTVYLQMNSLKPEDTAMYSCKAYGYDENYFPMDYWGQGTSVTVS

SEQ ID NO: 2784 - protein, 118 aa, synthetic construct
VKLEESGGGSVQAGGSLRLTCTAPGFRSNSCGMDWYRQAPGKEREFVSSISPDGTTSYADSVKGRFTISKDKATDTVYLQMNSLKPEDTAMYSCKAYGYDENYYAMDYWGQGTSVTVS

SEQ ID NO: 2785 - protein, 118 aa, synthetic construct
VKLEESGGGSVQAGGSLRLTCTAPGFRSNSCGMDWYRQAPGKEREFVSSISRDGTTSYADSVKGRFTISKDKATDTVYLQMNSLKPEDTAMYSCKAYGYDENYFPMDYWGQGTSVTVS

SEQ ID NO: 2786 - protein, 118 aa, synthetic construct
VKLEESGGGSVQAGGSLRLTCTAPGFRSNSCGMDWYRQAPGKEREFVSSISRDGTTSYADSVKGRFTISKDKATDTVYLQMNSLKPEDTAMYSCKAYGYDENYYAMDYWGQGTSVTVS

SEQ ID NO: 2787 - protein, 118 aa, synthetic construct
VKLEESGGGSVQAGGSLRLTCTAPGLRSNSCGMDWYRQAPGKERDFVSSISRDGTTSYADSVKGRFTISKDKATDTVYLQMNSLKPEDTAMYSCKAYGYDENYFPMDYWGQGTSVTVS

SEQ ID NO: 2788 - protein, 118 aa, synthetic construct
VKLEESGGGSVQAGGSLRLTCTAPGLRSNSCGMDWYRQAPGKEREFVSSISADGTTSYADSVKGRFTISKDKAKATVYLQMNSLKPDDTAMYSCKAYGYDENYYFMDYWGQGTSVTVS

SEQ ID NO: 2789 - protein, 118 aa, synthetic construct
VKLEESGGGSVQAGGSLRLTCTAPGLRSNSCGMDWYRQAPGKEREFVSSISADGTTSYADSVKGRFTISKDKATDTVYLQMNSLKPEDTAMYSCKAYGYDENYFPMDYWGQGTSVTVS

SEQ ID NO: 2790 - protein, 118 aa, synthetic construct
VKLEESGGGSVQAGGSLRLTCTAPGLRSNSWGMDWYRQAPGKERDFVSSISRDGTTSYADSVKGRFTISKDKATDTVYLQMNSLKPEDTAMYSCKAYGYDENYFPMDYWGQGTSVTVS

SEQ ID NO: 2791 - protein, 118 aa, synthetic construct
VKLEESGGGSVQTGGSLRLSCTAPGFKRNSWGMDWYRQAPGKERDFVSSISRDGTTSYADSVKGRFTISKDKATDTVYLQMNSLKPEDTAMYSCKAYGYDENYFPMDYWGQGTSVTVS

SEQ ID NO: 2792 - protein, 118 aa, synthetic construct
VKLEESGGGSVQTGGSLRLSCTAPGFKRNSWGMDWYRQAPGKERDFVSSISRDGTTSYADSVKGRFTISKDKATDTVYLQMNSLKPEDTAMYSCKAYGYDENYYAMDYWGQGTSVTVS

SEQ ID NO: 2793 - protein, 118 aa, synthetic construct
VKLEESGGGSVQTGGSLRLSCTAPGFKRNSWGMDWYRQAPGKEREFVSSISADGTTSYADSVKGRFTISKDKAKDTFYLQMNNLKPEDTAMYSCKAYGYDENYYAMDYWGQGTSVTVS

SEQ ID NO: 2794 - protein, 118 aa, synthetic construct
VKLEESGGGSVQTGGSLRLSCTAPGFKRNSWGMDWYRQAPGKEREFVSSISADGTTSYADSVKGRFTISKDKAKDTFYLQMNSLKPEDSAMYSCKAYGYDENYYAMDYWGQGTSVTVS

SEQ ID NO: 2795 - protein, 118 aa, synthetic construct
VKLEESGGGSVQTGGSLRLSCTAPGFKRNSWGMDWYRQAPGKEREFVSSISADGTTSYADSVKGRFTISKDKAKDTFYLQMNSLKPEDTAVYSCKAYGYDENYYAMAYWGQGTSVTVS

SEQ ID NO: 2796 - protein, 118 aa, synthetic construct
VKLEESGGGSVQTGGSLRLSCTAPGFKRNSWGMDWYRQAPGKEREFVSSISADGTTSYADSVKGRFTISKDKATDTVYLQMNSLKPEDTAMYSCKAYGYDENYFPMDYWGQGTSVTVS

SEQ ID NO: 2797 - protein, 118 aa, synthetic construct
VKLEESGGGSVQTGGSLRLSCTAPGFKRNSWGMDWYRQAPGKEREFVSSISRDGTTSYADSVKGRFTISKDKAKDTFYLQMNSLKPEDTAMYSCKAYGYDENYFPMDYWGQGTSVTVS

SEQ ID NO: 2798 - protein, 118 aa, synthetic construct
VKLEESGGGSVQTGGSLRLSCTAPGFKRNSWGMDWYRQAPGKEREFVSSISRDGTTSYADSVKGRFTISKDKAKDTFYLQMNSLKPEDTAMYSCKAYGYDENYYAMDYWGQGTSVTVS

SEQ ID NO: 2799 - protein, 118 aa, synthetic construct
VKLEESGGGSVQTGGSLRLSCTAPGFKRNSWGMDWYRQAPGKEREFVSSISRDGTTSYADSVKGRFTISKDKAKDTFYLQMNSLKPEDTAVYSCKAYGYDENYYAMAYWGQGTSVTVS

SEQ ID NO: 2800 - protein, 118 aa, synthetic construct
VKLEESGGGSVQTGGSLRLSCTAPGFKRNSWGMDWYRQAPGKEREFVSSISRDGTTSYADSVKGRFTISKDKATDTVYLQMNSLKPEDTAMYSCKAYGYDENYFPMDYWGQGTSVTVS

SEQ ID NO: 2801 - protein, 118 aa, synthetic construct
VKLEESGGGSVQTGGSLRLSCTAPGFKRNSWGMDWYRQAPGKEREFVSSISRDGTTSYADSVKGRFTISKDKATDTVYLQMNSLKPEDTAMYSCKAYGYDENYYAMDYWGQGTSVTVS

SEQ ID NO: 2802 - protein, 118 aa, synthetic construct
VKLEESGGGSVQTGGSLRLSCTAPGFKSNSWGMDWYRQAPGKERDFVSSISRDGTTSYADSVKGRFTISKDKATDTVYLQMNSLKPEDTAMYSCKAYGYDENYFPMDYWGQGTSVTVS

SEQ ID NO: 2803 - protein, 118 aa, synthetic construct
VKLEESGGGSVQTGGSLRLSCTAPGFKSNSWGMDWYRQAPGKERDFVSSISRDGTTSYADSVKGRFTISKDKATDTVYLQMNSLKPEDTAMYSCKAYGYDENYYAMDYWGQGTSVTVS

SEQ ID NO: 2804 - protein, 118 aa, synthetic construct
VKLEESGGGSVQTGGSLRLSCTAPGLRSNSCGMDWYRQAPGKEREFVASISADGTTSYADSVKGRFTISKDKATDTVYLQMNSLKPEDTAMYSCKAYGYDENYFPMDYWGQGTSVTVS

SEQ ID NO: 2805 - protein, 118 aa, synthetic construct
VKLEESGGGSVQTGGSLRLSCTAPGLRSNSCGMDWYRQAPGKEREFVSSISADGTTSYADSVKGRFTISKDKATDTVYLQMNSLKPEDTAMYSCKAYGYDENYFPMDYWGQGTSVTVS

SEQ ID NO: 2806 - protein, 118 aa, synthetic construct
VKLEESGGGSVQTGGSLRLSCTAPGLRSNSCGMDWYRQAPGKEREFVSSISADGTTSYADSVKGRFTISKDKATDTVYLQMNSLKPEDTAMYSCKAYGYDENYYAMDYWGQGTSVTVS

SEQ ID NO: 2807 - protein, 8 aa, synthetic construct
GFKRNSWG

SEQ ID NO: 2808 - protein, 8 aa, synthetic construct
GFRSNSCG

SEQ ID NO: 2809 - protein, 8 aa, synthetic construct
GFRSNSWG

SEQ ID NO: 2810 - protein, 8 aa, synthetic construct
GFKSNRYG

SEQ ID NO: 2811 - protein, 8 aa, synthetic construct
GFKSNSCG

SEQ ID NO: 2812 - protein, 8 aa, synthetic construct
GFKSNSWG

SEQ ID NO: 2813 - protein, 8 aa, synthetic construct
GLRSNSCG

SEQ ID NO: 2814 - protein, 8 aa, synthetic construct
GLRSNSWG

SEQ ID NO: 2815 - protein, 8 aa, synthetic construct
ISADGTTS

SEQ ID NO: 2816 - protein, 7 aa, synthetic construct
ISPDGTT

SEQ ID NO: 2817 - protein, 7 aa, synthetic construct
ISRDGTT

SEQ ID NO: 2818 - protein, 7 aa, synthetic construct
ISADGTT

SEQ ID NO: 2819 - protein, 7 aa, synthetic construct
IDRDGTT

SEQ ID NO: 2820 - protein, 8 aa, synthetic construct
ISRDGTTS

SEQ ID NO: 2821 - protein, 7 aa, synthetic construct
ISTDGTI

SEQ ID NO: 2822 - protein, 8 aa, synthetic construct
SIDRDGTT

SEQ ID NO: 2823 - protein, 8 aa, synthetic construct
SISADGTT

SEQ ID NO: 2824 - protein, 8 aa, synthetic construct
ISTDGTIS

SEQ ID NO: 2825 - protein, 14 aa, synthetic construct
KAYGYDENYYAMDY

SEQ ID NO: 2826 - protein, 14 aa, synthetic construct
KAYGYDENYFPMDY

SEQ ID NO: 2827 - protein, 14 aa, synthetic construct
KAYGYDKNYYAMDY

SEQ ID NO: 2828 - protein, 14 aa, synthetic construct
KAYGYDENYYFMDY

SEQ ID NO: 2829 - protein, 14 aa, synthetic construct
KAYGYDENYFAMDY

SEQ ID NO: 2830 - protein, 14 aa, synthetic construct
KAYGYDKNYFPMDY

SEQ ID NO: 2831 - protein, 14 aa, synthetic construct
KAYGYDENYYAMAY

SEQ ID NO: 2832 - protein, 14 aa, synthetic construct
KAYGYDENYYARDY

SEQ ID NO: 2833 - protein, 14 aa, synthetic construct
KAYGYDENYLPMDY

SEQ ID NO: 2834 - protein, 14 aa, synthetic construct
KAYGYDENYLAMDY

SEQ ID NO: 2835 - protein, 115 aa, synthetic construct
EVQLVESGGGSVEAGGSLRLSCTASGFTFDDSDMGWYRQAPGNERELVATIRSDGSTYYADSVKGRFTISQDNAKNTVYLQMNSLKPEDTAMYYCASLWLRRLVCWGQGTLVTVS

SEQ ID NO: 2836 - protein, 115 aa, synthetic construct
EVQLVESGGGSVEAGGSLRLSCTASGFTFDDSDMGWYRQAPGNERELVATIRSDGSTYYGDSVKGRFSISQDNAKNTIYLQMNSLKPEDTAMYYCASLWLRRLVCWGQGTLVTVS

SEQ ID NO: 2837 - protein, 115 aa, synthetic construct
EVQLVESGGGSVEAGGSLRLSCTASGFTFDDSDMGWYRQAPGNERELVATIRSDGSTYYGDSVKGRFSISQDNAKNTVYLQMNSLKPEDTAMYYCASLWLRRLVCWGQGTLVTVS

SEQ ID NO: 2838 - protein, 115 aa, synthetic construct
EVQLVESGGGSVEAGGSLRLSCTASGFTFDDSDMGWYRQAPGNERELVATIRSDGSTYYGDSVKGRFSISQDNAKNTVYLQMNSLKPEDTAVYYCASLWLRRLVCWGQGTLVTVS

SEQ ID NO: 2839 - protein, 115 aa, synthetic construct
EVQLVESGGGSVEAGGSLRLSCTASGFTFDDSDMGWYRQAPGNERELVATIRSDGSTYYGDSVKGRFTISQDNAKNTIYLQMNSLKPEDTAMYYCASLWLRRLVCWGQGTLVTVS

SEQ ID NO: 2840 - protein, 115 aa, synthetic construct
EVQLVESGGGSVEAGGSLRLSCTASGFTFDDSDMGWYRQAPGNERELVATIRSDGSTYYGDSVKGRFTISQDNAKNTVYLQMNSLKPEDTAMYYCASLWLRRLVCWGQGTLVTVS

SEQ ID NO: 2841 - protein, 115 aa, synthetic construct
EVQLVESGGGSVEAGGSLRLSCTASGFTFDDSDMGWYRQAPGNERELVATIRSDGSTYYGDSVKGRFTISQDNAKNTVYLQMNSLKPEDTAVYYCASLWLRRLVCWGQGTLVTVS

SEQ ID NO: 2842 - protein, 115 aa, synthetic construct
EVQLVESGGGSVEAGGSLRLSCTASGFTFDDSDMGWYRQAPGNERELVSTIRSDGSAYYADSVKGRFTISQDNAKNTVYLQMNSLKPEDTAVYYCASLWLRRLVCWGQGTLVTVS

SEQ ID NO: 2843 - protein, 115 aa, synthetic construct
EVQLVESGGGSVEAGGSLRLSCTASGFTFDDSDMGWYRQAPGNERELVSTIRSDGSTLYADSVKGRFTISQDNAKNTIYLQMNSLKPEDTAMYYCASLWLRRLVCWGQGTLVTVS

SEQ ID NO: 2844 - protein, 115 aa, synthetic construct
EVQLVESGGGSVEAGGSLRLSCTASGFTFDDSDMGWYRQAPGNERELVSTIRSDGSTYYADSVKGRFTISQDNAKNTVYLQMNSLKPEDTAMYYCASLWLRRLVCWGQGTLVTVS

SEQ ID NO: 2845 - protein, 115 aa, synthetic construct
EVQLVESGGGSVEAGGSLRLSCTASGFTFDDSDMGWYRQAPGNERELVSTIRSDGSTYYGDSVKGRFSISQDNAKNTVYLQMNSLKPEDTAMYYCASLWLRRLVCWGQGTLVTVS

SEQ ID NO: 2846 - protein, 115 aa, synthetic construct
EVQLVESGGGSVEAGGSLRLSCTASGFTFDDSDMGWYRQAPGNERELVSTIRSDGSTYYVDSVKGRFTISQDNAKNTIYLQMNSLKPEDTAMYYCASLWLRRLVCWGQGTLVTVS

SEQ ID NO: 2847 - protein, 115 aa, synthetic construct
EVQLVESGGGSVEAGGSLRLSCTASGFTFDDSDMGWYRQAPGNERELVSTIRSDGSTYYVDSVKGRFTISQDNAKNTVYLQMNSLKPEDTAMYYCASLWLRRLVCWGQGTLVTVS

SEQ ID NO: 2848 - protein, 115 aa, synthetic construct
EVQLVESGGGSVEAGGSLRLSCTASGFTFDDSDMGWYRQAPGNERELVSTIRSDGSTYYVDSVKGRFTISQDNAKNTVYLQMNSLKPEDTAVYYCASLWLRRLVCWGQGTLVTVS

SEQ ID NO: 2849 - protein, 115 aa, synthetic construct
EVQLVESGGGSVEAGGSLRLSCTASGFTFDDSDMGWYRQAPGNERELVSTISSDGSTYYADSVKGRFTISQDNAKNTVYLQMNSLKPEDTAMYYCASLWLRRLVCWGQGTLVTVS

SEQ ID NO: 2850 - protein, 115 aa, synthetic construct
EVQLVESGGGSVEAGGSLRLSCTASGFTFDDSDMGWYRQAPGNERELVSTISSDGSTYYADSVKGRFTISQDNAKNTVYLQMNSLKPEDTAVYYCASLWLRRLVCWGQGTLVTVS

SEQ ID NO: 2851 - protein, 115 aa, synthetic construct
EVQLVESGGGSVEAGGSLRLSCTASGFTFDVSDMGWYRQAPGNERELVATIRSDGSTYYGDSVKGRFSISQDNAKNTVYLQMNSLKPEDTAMYYCASLWLRRLVCWGQGTLVTVS

SEQ ID NO: 2852 - protein, 115 aa, synthetic construct
EVQLVESGGGSVEAGGSLRLSCTASGFTFDVSDMGWYRQAPGNERELVSTIRSDGSTYYVDSVKGRFTISQDNAKNTVYLQMNSLKPEDTAMYYCASLWLRRLVCWGQGTLVTVS

SEQ ID NO: 2853 - protein, 115 aa, synthetic construct
EVQLVESGGGSVEAGGSLRLSRTASGFTFDDSDMGWYRQAPGNERELVATIRSDGSTYYGDSVKGRFSISQDNAKNTVYLQMNSLKPEDTAMYYCASLWLRRLVCWGQGTLVTVS

SEQ ID NO: 2854 - protein, 115 aa, synthetic construct
EVQLVESGGGSVEAGGSLRLSRTASGFTFDDSDMGWYRQAPGNERELVATIRSDGSTYYGDSVKGRFTISQDNAKNTVYLQMNSLKPEDTAMYYCASLWLRRLVCWGQGTLVTVS

SEQ ID NO: 2855 - protein, 115 aa, synthetic construct
EVQLVESGGGSVEAGGSLRLSRTASGFTFDDSDMGWYRQAPGNERELVATIRSDGSTYYVDSVKGRFTISQDNAKNTVYLQMNSLKPEDTAVYYCASLWLRRLVCWGQGTLVTVS

SEQ ID NO: 2856 - protein, 115 aa, synthetic construct
EVQLVESGGGSVQAGGSLRLSCTASGFTFDDSDMGWYRQAPGNECELVSTIRSDGSTYYVDSVKGRFTISQDNAKNTVYLQMNSLKPEDTAMYYCASLWLRRLVCWGQGTLVTVS

SEQ ID NO: 2857 - protein, 115 aa, synthetic construct
EVQLVESGGGSVQAGGSLRLSCTASGFTFDDSDMGWYRQAPGNERELVATIRSDGSAYYADSVKGRFTISQDNAKNTIYLQMNSLKPEDTAMYYCASLWLRRLVCWGQGTLVTVS

SEQ ID NO: 2858 - protein, 115 aa, synthetic construct
EVQLVESGGGSVQAGGSLRLSCTASGFTFDDSDMGWYRQAPGNERELVATIRSDGSAYYADSVKGRFTISQDNAKNTVYLQMNSLKPEDTAMYYCASLWLRRLVCWGQGTLVTVS

SEQ ID NO: 2859 - protein, 115 aa, synthetic construct
EVQLVESGGGSVQAGGSLRLSCTASGFTFDDSDMGWYRQAPGNERELVATIRSDGSTYYADSVKGRFTISQDNAKNTIYLQMNSLKPEDTAMYYCASLWLRRLVCWGQGTLVTVS

SEQ ID NO: 2860 - protein, 115 aa, synthetic construct
EVQLVESGGGSVQAGGSLRLSCTASGFTFDDSDMGWYRQAPGNERELVATIRSDGSTYYADSVKGRFTISQDNAKNTVYLQMNSLKPEDTAMYYCASLWLRRLVCWGQGTLVTVS

SEQ ID NO: 2861 - protein, 115 aa, synthetic construct
EVQLVESGGGSVQAGGSLRLSCTASGFTFDDSDMGWYRQAPGNERELVATIRSDGSTYYGDSVKGRFSISQDNAKNTIYLQMNSLKPEDTAMYYCASLWLRRLVCWGQGTLVTVS

SEQ ID NO: 2862 - protein, 115 aa, synthetic construct
EVQLVESGGGSVQAGGSLRLSCTASGFTFDDSDMGWYRQAPGNERELVATIRSDGSTYYGDSVKGRFSISQDNAKNTVYLQMNSLKPEDTAMYYCASLWLRRLVCWGQGTLVTVS

SEQ ID NO: 2863 - protein, 115 aa, synthetic construct
EVQLVESGGGSVQAGGSLRLSCTASGFTFDDSDMGWYRQAPGNERELVATIRSDGSTYYGDSVKGRFSISQDNAKNTVYLQMNSLKPEDTAVYYCASLWLRRLVCWGQGTLVTVS

SEQ ID NO: 2864 - protein, 115 aa, synthetic construct
EVQLVESGGGSVQAGGSLRLSCTASGFTFDDSDMGWYRQAPGNERELVATIRSDGSTYYGDSVKGRFTISQDNAKNTIYLQMNSLKPEDTAMYYCASLWLRRLVCWGQGTLVTVS

SEQ ID NO: 2865 - protein, 115 aa, synthetic construct
EVQLVESGGGSVQAGGSLRLSCTASGFTFDDSDMGWYRQAPGNERELVATIRSDGSTYYGDSVKGRFTISQDNAKNTVYLQMNSLKPEDTAMYYCASLWLRRLVCWGQGTLVTVS

SEQ ID NO: 2866 - protein, 115 aa, synthetic construct
EVQLVESGGGSVQAGGSLRLSCTASGFTFDDSDMGWYRQAPGNERELVATIRSDGSTYYGDSVKGRFTISQDNAKNTVYLQMNSLKPEDTAVYYCASLWLRRLVCWGQGTLVTVS

SEQ ID NO: 2867 - protein, 115 aa, synthetic construct
EVQLVESGGGSVQAGGSLRLSCTASGFTFDDSDMGWYRQAPGNERELVATIRSDGSTYYVDSVKGRFTISQDNAKNTIYLQMNSLKPEDTAMYYCASLWLRRLVCWGQGTLVTVS

SEQ ID NO: 2868 - protein, 115 aa, synthetic construct
EVQLVESGGGSVQAGGSLRLSCTASGFTFDDSDMGWYRQAPGNERELVATIRSDGSTYYVDSVKGRFTISQDNAKNTVYLQMNSLKPEDTAMYYCASLWLRRLVCWGQGTLVTVS

SEQ ID NO: 2869 - protein, 115 aa, synthetic construct
EVQLVESGGGSVQAGGSLRLSCTASGFTFDDSDMGWYRQAPGNERELVATIRSDGSTYYVDSVKGRFTISQDNAKNTVYLQMNSLKPEDTAVYYCASLWLRRLVCWGQGTLVTVS

SEQ ID NO: 2870 - protein, 115 aa, synthetic construct
EVQLVESGGGSVQAGGSLRLSCTASGFTFDDSDMGWYRQAPGNERELVATISSDGSAYYADSVKGRFTISQDNAKNTIYLQMNSLKPEDTAMYYCASLWLRRLVCWGQGTLVTVS

SEQ ID NO: 2871 - protein, 115 aa, synthetic construct
EVQLVESGGGSVQAGGSLRLSCTASGFTFDDSDMGWYRQAPGNERELVATISSDGSAYYADSVKGRFTISQDNAKNTVYLQMNSLKPEDTAMYYCASLWLRRLVCWGQGTLVTVS

SEQ ID NO: 2872 - protein, 115 aa, synthetic construct
EVQLVESGGGSVQAGGSLRLSCTASGFTFDDSDMGWYRQAPGNERELVSTIRSDGSAYYADSVKGRFTISQDNAKNTVYLQMNSLKPEDTAMYYCASLWLRRLVCWGQGTLVTVS

SEQ ID NO: 2873 - protein, 115 aa, synthetic construct
EVQLVESGGGSVQAGGSLRLSCTASGFTFDDSDMGWYRQAPGNERELVSTIRSDGSTYYADSVKGRFTISQDNAKNTIYLQMNSLKPEDTAMYYCASLWLRRLVCWGQGTLVTVS

SEQ ID NO: 2874 - protein, 115 aa, synthetic construct
EVQLVESGGGSVQAGGSLRLSCTASGFTFDDSDMGWYRQAPGNERELVSTIRSDGSTYYADSVKGRFTISQDNAKNTVYLQMNSLKPEDTAMYYCASLWLRRLVCWGQGTLVTVS

SEQ ID NO: 2875 - protein, 115 aa, synthetic construct
EVQLVESGGGSVQAGGSLRLSCTASGFTFDDSDMGWYRQAPGNERELVSTIRSDGSTYYGDSVKGRFSISQDNAKNTIYLQMNSLKPEDTAMYYCASLWLRRLVCWGQGTLVTVS

SEQ ID NO: 2876 - protein, 115 aa, synthetic construct
EVQLVESGGGSVQAGGSLRLSCTASGFTFDDSDMGWYRQAPGNERELVSTIRSDGSTYYGDSVKGRFSISQDNAKNTVYLQMNSLKPEDTAMYYCASLWLRRLVCWGQGTLVTVS

SEQ ID NO: 2877 - protein, 115 aa, synthetic construct
EVQLVESGGGSVQAGGSLRLSCTASGFTFDDSDMGWYRQAPGNERELVSTIRSDGSTYYGDSVKGRFSISQDNAKNTVYLQMNSLKPEDTAVYYCASLWLRRLVCWGQGTLVTVS

SEQ ID NO: 2878 - protein, 115 aa, synthetic construct
EVQLVESGGGSVQAGGSLRLSCTASGFTFDDSDMGWYRQAPGNERELVSTIRSDGSTYYGDSVKGRFTISQDNAKNTIYLQMNSLKPEDTAMYYCASLWLRRLVCWGQGTLVTVS

SEQ ID NO: 2879 - protein, 115 aa, synthetic construct
EVQLVESGGGSVQAGGSLRLSCTASGFTFDDSDMGWYRQAPGNERELVSTIRSDGSTYYVDSVKGRFSISQDNAKNTVYLQMNSLKPEDTAMYYCASLWLRRLVCWGQGTLVTVS

SEQ ID NO: 2880 - protein, 115 aa, synthetic construct
EVQLVESGGGSVQAGGSLRLSCTASGFTFDDSDMGWYRQAPGNERELVSTIRSDGSTYYVDSVKGRFSISQDNAKNTVYLQMNSLKPEDTAVYYCASLWLRRLVCWGQGTLVTVS

SEQ ID NO: 2881 - protein, 115 aa, synthetic construct
EVQLVESGGGSVQAGGSLRLSCTASGFTFDDSDMGWYRQAPGNERELVSTIRSDGSTYYVDSVKGRFTISQDNAKNTIYLQMNSLKPEDTAMYYCASLWLRRLVCWGQGTLVTVS

SEQ ID NO: 2882 - protein, 115 aa, synthetic construct
EVQLVESGGGSVQAGGSLRLSCTASGFTFDDSDMGWYRQAPGNERELVSTIRSDGSTYYVDSVKGRFTISQDNAKNTVYLQMNSLKPEDTAMYYCASLWLRRLVCWGQGTLVTVS

SEQ ID NO: 2883 - protein, 115 aa, synthetic construct
EVQLVESGGGSVQAGGSLRLSCTASGFTFDDSDMGWYRQAPGNERELVSTIRSDGSTYYVDSVKGRFTISQDNAKNTVYLQMNSLKPEDTAVYYCASLWLRRLVCWGQGTLVTVS

SEQ ID NO: 2884 - protein, 115 aa, synthetic construct
EVQLVESGGGSVQAGGSLRLSCTASGFTFDDSDMGWYRQAPGNERELVSTISSDGSTYYADSVKGRFSISQDNAKNTVYLQMNSLKPEDTAVYYCASLWLRRLVCWGQGTLVTVS

SEQ ID NO: 2885 - protein, 115 aa, synthetic construct
EVQLVESGGGSVQAGGSLRLSCTASGFTFDDSDMGWYRQAPGNERELVSTISSDGSTYYADSVKGRFTISQDNAKNTVYLQMNSLKPEDTAMYYCASLWLRRLVCWGQGTLVTVS

SEQ ID NO: 2886 - protein, 115 aa, synthetic construct
EVQLVESGGGSVQAGGSLRLSCTASGFTFDDSDMGWYRQAPGNERELVSTISSDGSTYYADSVKGRFTISQDNAKNTVYLQMNSLKPEDTAVYYCASLWLRRLVCWGQGTLVTVS

SEQ ID NO: 2887 - protein, 115 aa, synthetic construct
EVQLVESGGGSVQAGGSLRLSCTASGFTFDDSDMGWYRQAPGNERELVSTISSDGSTYYVDSVKGRFTISQDNAKNTVYLQMNSLKPEDTAMYYCASLWLRRLVCWGQGTLVTVS

SEQ ID NO: 2888 - protein, 115 aa, synthetic construct
EVQLVESGGGSVQAGGSLRLSCTASGFTFDDSDMGWYRQARGNERELVATIRSDGSTYYGDSVKGRFSISQDNAKNTVYLQMNSLKPEDTAMYYCASLWLRRLVCWGQGTLVTVS

SEQ ID NO: 2889 - protein, 115 aa, synthetic construct
EVQLVESGGGSVQAGGSLRLSCTASGFTFDDSDMGWYRQARGNERELVATIRSDGSTYYGDSVKGRFTISQDNAKNTVYLQMNSLKPEDTAMYYCASLWLRRLVCWGQGTLVTVS

SEQ ID NO: 2890 - protein, 115 aa, synthetic construct
EVQLVESGGGSVQAGGSLRLSCTASGFTFDDSDMGWYRQARGNERELVSTIRSDGSTYYVDSVKGRFSISQDNAKNTVYLQMNSLKPEDTAMYYCASLWLRRLVCWGQGTLVTVS

SEQ ID NO: 2891 - protein, 115 aa, synthetic construct
EVQLVESGGGSVQAGGSLRLSCTASGFTFDDSDMGWYRQARGNERELVSTIRSDGSTYYVDSVKGRFTISQDNAKNTVYLQMNSLKPEDTAMYYCASLWLRRLVCWGQGTLVTVS

SEQ ID NO: 2892 - protein, 115 aa, synthetic construct
EVQLVESGGGSVQAGGSLRLSCTASGFTFDDSDMGWYRQARGNERELVSTIRSDGSTYYVDSVKGRFTISQDNAKNTVYLQMNSLKPEDTAVYYCASLWLRRLVCWGQGTLVTVS

SEQ ID NO: 2893 - protein, 115 aa, synthetic construct
EVQLVESGGGSVQAGGSLRLSCTASGFTFDDSDMGWYRQARGNERELVSTISSDGSTYYGDSVKGRFTISQDNAKNTVYLQMNSLKPEDTAMYYCASLWLRRLVCWGQGTLVTVS

SEQ ID NO: 2894 - protein, 115 aa, synthetic construct
EVQLVESGGGSVQAGGSLRLSCTASGFTFDDSDMGWYRQARGNERELVSTISSDGSTYYGDSVKGRFTISQDNAKNTVYLQMNSLKPEDTAVYYCASLWLRRLVCWGQGTLVTVS

SEQ ID NO: 2895 - protein, 115 aa, synthetic construct
EVQLVESGGGSVQAGGSLRLSCTASGFTFDDSDMGWYRQARGNERELVSTISSDGSTYYVDSVKGRFTISQDNAKNTVYLQMNSLKPEDTAMYYCASLWLRRLVCWGQGTLVTVS

SEQ ID NO: 2896 - protein, 115 aa, synthetic construct
EVQLVESGGGSVQAGGSLRLSCTASGFTFDVSDMGWYRQAPGNECELVSTIRSDGSTYYVDSVKGRFTISQDNAKNTIYLQMNSLKPEDTAMYYCASLWLRRLVCWGQGTLVTVS

SEQ ID NO: 2897 - protein, 115 aa, synthetic construct
EVQLVESGGGSVQAGGSLRLSCTASGFTFDVSDMGWYRQAPGNERELVATIRSDGSTYYGDSVKGRFSISQDNAKNTIYLQMNSLKPEDTAMYYCASLWLRRLVCWGQGTLVTVS

SEQ ID NO: 2898 - protein, 115 aa, synthetic construct
EVQLVESGGGSVQAGGSLRLSCTASGFTFDVSDMGWYRQAPGNERELVATIRSDGSTYYGDSVKGRFSISQDNAKNTVYLQMNSLKPEDTAMYYCASLWLRRLVCWGQGTLVTVS

SEQ ID NO: 2899 - protein, 115 aa, synthetic construct
EVQLVESGGGSVQAGGSLRLSCTASGFTFDVSDMGWYRQAPGNERELVATIRSDGSTYYGDSVKGRFSISQDNAKNTVYLQMNSLKPEDTAVYYCASLWLRRLVCWGQGTLVTVS

SEQ ID NO: 2900 - protein, 115 aa, synthetic construct
EVQLVESGGGSVQAGGSLRLSCTASGFTFDVSDMGWYRQAPGNERELVATIRSDGSTYYGDSVKGRFTISQDNAKNTIYLQMNSLKPEDTAMYYCASLWLRRLVCWGQGTLVTVS

SEQ ID NO: 2901 - protein, 115 aa, synthetic construct
EVQLVESGGGSVQAGGSLRLSCTASGFTFDVSDMGWYRQAPGNERELVATIRSDGSTYYGDSVKGRFTISQDNAKNTVYLQMNSLKPEDTAMYYCASLWLRRLVCWGQGTLVTVS

SEQ ID NO: 2902 - protein, 115 aa, synthetic construct
EVQLVESGGGSVQAGGSLRLSCTASGFTFDVSDMGWYRQAPGNERELVATIRSDGSTYYVDSVKGRFTISQDNAKNTVYLQMNSLKPEDTAMYYCASLWLRRLVCWGQGTLVTVS

SEQ ID NO: 2903 - protein, 115 aa, synthetic construct
EVQLVESGGGSVQAGGSLRLSCTASGFTFDVSDMGWYRQAPGNERELVSTIRSDGSAYYADSVKGRFTISQDNAKNTVYLQMNSLKPEDTAMYYCASLWLRRLVCWGQGTLVTVS

SEQ ID NO: 2904 - protein, 115 aa, synthetic construct
EVQLVESGGGSVQAGGSLRLSCTASGFTFDVSDMGWYRQAPGNERELVSTIRSDGSAYYADSVKGRFTISQDNAKNTVYLQMNSLKPEDTAVYYCASLWLRRLVCWGQGTLVTVS

SEQ ID NO: 2905 - protein, 115 aa, synthetic construct
EVQLVESGGGSVQAGGSLRLSCTASGFTFDVSDMGWYRQAPGNERELVSTIRSDGSTYYADSVKGRFTISQDNAKNTVYLQMNSLKPEDTAMYYCASLWLRRLVCWGQGTLVTVS

SEQ ID NO: 2906 - protein, 115 aa, synthetic construct
EVQLVESGGGSVQAGGSLRLSCTASGFTFDVSDMGWYRQAPGNERELVSTIRSDGSTYYGDSVKGRFSISQDNAKNTIYLQMNSLKPEDTAMYYCASLWLRRLVCWGQGTLVTVS

SEQ ID NO: 2907 - protein, 115 aa, synthetic construct
EVQLVESGGGSVQAGGSLRLSCTASGFTFDVSDMGWYRQAPGNERELVSTIRSDGSTYYGDSVKGRFSISQDNAKNTVYLQMNSLKPEDTAMYYCASLWLRRLVCWGQGTLVTVS

SEQ ID NO: 2908 - protein, 115 aa, synthetic construct
EVQLVESGGGSVQAGGSLRLSCTASGFTFDVSDMGWYRQAPGNERELVSTIRSDGSTYYGDSVKGRFTISQDNAKNTIYLQMNSLKPEDTAMYYCASLWLRRLVCWGQGTLVTVS

SEQ ID NO: 2909 - protein, 115 aa, synthetic construct
EVQLVESGGGSVQAGGSLRLSCTASGFTFDVSDMGWYRQAPGNERELVSTIRSDGSTYYGDSVKGRFTISQDNAKNTVYLQMNSLKPEDTAMYYCASLWLRRLVCWGQGTLVTVS

SEQ ID NO: 2910 - protein, 115 aa, synthetic construct
EVQLVESGGGSVQAGGSLRLSCTASGFTFDVSDMGWYRQAPGNERELVSTIRSDGSTYYVDSVKGRFTISQDNAKNTIYLQMNSLKPEDTAMYYCASLWLRRLVCWGQGTLVTVS

SEQ ID NO: 2911 - protein, 115 aa, synthetic construct
EVQLVESGGGSVQAGGSLRLSCTASGFTFDVSDMGWYRQAPGNERELVSTIRSDGSTYYVDSVKGRFTISQDNAKNTVYLQMNSLKPEDTAMYYCASLWLRRLVCWGQGTLVTVS

SEQ ID NO: 2912 - protein, 115 aa, synthetic construct
EVQLVESGGGSVQAGGSLRLSCTASGFTFDVSDMGWYRQAPGNERELVSTIRSDGSTYYVDSVKGRFTISQDNAKNTVYLQMNSLKPEDTAVYYCASLWLRRLVCWGQGTLVTVS

SEQ ID NO: 2913 - protein, 115 aa, synthetic construct
EVQLVESGGGSVQAGGSLRLSCTASGFTFDVSDMGWYRQAPGNERELVSTISSDGSTYYADSVKGRFTISQDNAKNTVYLQMNSLKPEDTAMYYCASLWLRRLVCWGQGTLVTVS

SEQ ID NO: 2914 - protein, 115 aa, synthetic construct
EVQLVESGGGSVQAGGSLRLSCTASGFTFDVSDMGWYRQAPGNERELVSTISSDGSTYYADSVKGRFTISQDNAKNTVYLQMNSLKPEDTAVYYCASLWLRRLVCWGQGTLVTVS

SEQ ID NO: 2915 - protein, 115 aa, synthetic construct
EVQLVESGGGSVQAGGSLRLSCTASGFTFDVSDMGWYRQAPGNERELVSTISSDGSTYYGDSVKGRFSISQDNAKNTVYLQMNSLKPEDTAMYYCASLWLRRLVCWGQGTLVTVS

SEQ ID NO: 2916 - protein, 115 aa, synthetic construct
EVQLVESGGGSVQAGGSLRLSCTASGFTFDVSDMGWYRQAPGNERELVSTISSDGSTYYGDSVKGRFTISQDNAKNTIYLQMNSLKPEDTAMYYCASLWLRRLVCWGQGTLVTVS

SEQ ID NO: 2917 - protein, 115 aa, synthetic construct
EVQLVESGGGSVQAGGSLRLSCTASGFTFDVSDMGWYRQAPGNERELVSTISSDGSTYYVDSVKGRFTISQDNAKNTVYLQMNSLKPEDTAMYYCASLWLRRLVCWGQGTLVTVS

SEQ ID NO: 2918 - protein, 115 aa, synthetic construct
EVQLVESGGGSVQAGGSLRLSRTASGFTFDDSDMGWYRQAPGNERELVATIRSDGSAYYADSVKGRFTISQDNAKNTVYLQMNSLKPEDTAMYYCASLWLRRLVCWGQGTLVTVS

SEQ ID NO: 2919 - protein, 115 aa, synthetic construct
EVQLVESGGGSVQAGGSLRLSRTASGFTFDDSDMGWYRQAPGNERELVATIRSDGSAYYADSVKGRFTISQDNAKNTVYLQMNSLKPEDTAVYYCASLWLRRLVCWGQGTLVTVS

SEQ ID NO: 2920 - protein, 115 aa, synthetic construct
EVQLVESGGGSVQAGGSLRLSRTASGFTFDDSDMGWYRQAPGNERELVATIRSDGSTYYADSVKGRFTISQDNAKNTIYLQMNSLKPEDTAMYYCASLWLRRLVCWGQGTLVTVS

SEQ ID NO: 2921 - protein, 115 aa, synthetic construct
EVQLVESGGGSVQAGGSLRLSRTASGFTFDDSDMGWYRQAPGNERELVATIRSDGSTYYADSVKGRFTISQDNAKNTVYLQMNSLKPEDTAMYYCASLWLRRLVCWGQGTLVTVS

SEQ ID NO: 2922 - protein, 115 aa, synthetic construct
EVQLVESGGGSVQAGGSLRLSRTASGFTFDDSDMGWYRQAPGNERELVATIRSDGSTYYGDSVKGRFSISQDNAKNTIYLQMNSLKPEDTAMYYCASLWLRRLVCWGQGTLVTVS

SEQ ID NO: 2923 - protein, 115 aa, synthetic construct
EVQLVESGGGSVQAGGSLRLSRTASGFTFDDSDMGWYRQAPGNERELVATIRSDGSTYYGDSVKGRFSISQDNAKNTIYLQMNSLKPEDTAVYYCASLWLRRLVCWGQGTLVTVS

SEQ ID NO: 2924 - protein, 115 aa, synthetic construct
EVQLVESGGGSVQAGGSLRLSRTASGFTFDDSDMGWYRQAPGNERELVATIRSDGSTYYGDSVKGRFSISQDNAKNTVYLQMNSLKPEDTAMYYCASLWLRRLVCWGQGTLVTVS

SEQ ID NO: 2925 - protein, 115 aa, synthetic construct
EVQLVESGGGSVQAGGSLRLSRTASGFTFDDSDMGWYRQAPGNERELVATIRSDGSTYYGDSVKGRFSISQDNAKNTVYLQMNSLKPEDTAVYYCASLWLRRLVCWGQGTLVTVS

SEQ ID NO: 2926 - protein, 115 aa, synthetic construct
EVQLVESGGGSVQAGGSLRLSRTASGFTFDDSDMGWYRQAPGNERELVATIRSDGSTYYGDSVKGRFTISQDNAKNTIYLQMNSLKPEDTAMYYCASLWLRRLVCWGQGTLVTVS

SEQ ID NO: 2927 - protein, 115 aa, synthetic construct
EVQLVESGGGSVQAGGSLRLSRTASGFTFDDSDMGWYRQAPGNERELVATIRSDGSTYYGDSVKGRFTISQDNAKNTVYLQMNSLKPEDTAMYYCASLWLRRLVCWGQGTLVTVS

SEQ ID NO: 2928 - protein, 115 aa, synthetic construct
EVQLVESGGGSVQAGGSLRLSRTASGFTFDDSDMGWYRQAPGNERELVATIRSDGSTYYGDSVKGRFTISQDNAKNTVYLQMNSLKPEDTAVYYCASLWLRRLVCWGQGTLVTVS

SEQ ID NO: 2929 - protein, 115 aa, synthetic construct
EVQLVESGGGSVQAGGSLRLSRTASGFTFDDSDMGWYRQAPGNERELVATIRSDGSTYYVDSVKGRFTISQDNAKNTVYLQMNSLKPEDTAMYYCASLWLRRLVCWGQGTLVTVS

SEQ ID NO: 2930 - protein, 115 aa, synthetic construct
EVQLVESGGGSVQAGGSLRLSRTASGFTFDDSDMGWYRQAPGNERELVATIRSDGSTYYVDSVKGRFTISQDNAKNTVYLQMNSLKPEDTAVYYCASLWLRRLVCWGQGTLVTVS

SEQ ID NO: 2931 - protein, 115 aa, synthetic construct
EVQLVESGGGSVQAGGSLRLSRTASGFTFDDSDMGWYRQAPGNERELVATISSDGSAYYADSVKGRFTISQDNAKNTIYLQMNSLKPEDTAMYYCASLWLRRLVCWGQGTLVTVS

SEQ ID NO: 2932 - protein, 115 aa, synthetic construct
EVQLVESGGGSVQAGGSLRLSRTASGFTFDDSDMGWYRQAPGNERELVATISSDGSAYYADSVKGRFTISQDNAKNTVYLQMNSLKPEDTAMYYCASLWLRRLVCWGQGTLVTVS

SEQ ID NO: 2933 - protein, 115 aa, synthetic construct
EVQLVESGGGSVQAGGSLRLSRTASGFTFDDSDMGWYRQAPGNERELVATISSDGSAYYADSVKGRFTISQDNAKNTVYLQMNSLKPEDTAVYYCASLWLRRLVCWGQGTLVTVS

SEQ ID NO: 2934 - protein, 115 aa, synthetic construct
EVQLVESGGGSVQAGGSLRLSRTASGFTFDDSDMGWYRQAPGNERELVATISSDGSTYYADSVKGRFTISQDNAKNTVYLQMNSLKPEDTAMYYCASLWLRRLVCWGQGTLVTVS

SEQ ID NO: 2935 - protein, 115 aa, synthetic construct
EVQLVESGGGSVQAGGSLRLSRTASGFTFDDSDMGWYRQAPGNERELVSTIRSDGSAYYADSVKGRFTISQDNAKNTIYLQMNSLKPEDTAMYYCASLWLRRLVCWGQGTLVTVS

SEQ ID NO: 2936 - protein, 115 aa, synthetic construct
EVQLVESGGGSVQAGGSLRLSRTASGFTFDDSDMGWYRQAPGNERELVSTIRSDGSTYYADSVKGRFTISQDNAKNTIYLQMNSLKPEDTAMYYCASLWLRRLVCWGQGTLVTVS

SEQ ID NO: 2937 - protein, 115 aa, synthetic construct
EVQLVESGGGSVQAGGSLRLSRTASGFTFDDSDMGWYRQAPGNERELVSTIRSDGSTYYGDSVKGRFSISQDNAKNTVYLQMNSLKPEDTAMYYCASLWLRRLVCWGQGTLVTVS

SEQ ID NO: 2938 - protein, 115 aa, synthetic construct
EVQLVESGGGSVQAGGSLRLSRTASGFTFDDSDMGWYRQAPGNERELVSTIRSDGSTYYGDSVKGRFSISQDNAKNTVYLQMNSLKPEDTAVYYCASLWLRRLVCWGQGTLVTVS

SEQ ID NO: 2939 - protein, 115 aa, synthetic construct
EVQLVESGGGSVQAGGSLRLSRTASGFTFDDSDMGWYRQAPGNERELVSTIRSDGSTYYVDSVKGRFSISQDNAKNTVYLQMNSLKPEDTAMYYCASLWLRRLVCWGQGTLVTVS

SEQ ID NO: 2940 - protein, 115 aa, synthetic construct
EVQLVESGGGSVQAGGSLRLSRTASGFTFDDSDMGWYRQAPGNERELVSTIRSDGSTYYVDSVKGRFTISQDNAKNTIYLQMNSLKPEDTAMYYCASLWLRRLVCWGQGTLVTVS

SEQ ID NO: 2941 - protein, 115 aa, synthetic construct
EVQLVESGGGSVQAGGSLRLSRTASGFTFDDSDMGWYRQAPGNERELVSTIRSDGSTYYVDSVKGRFTISQDNAKNTVYLQMNSLKPEDTAMYYCASLWLRRLVCWGQGTLVTVS

SEQ ID NO: 2942 - protein, 115 aa, synthetic construct
EVQLVESGGGSVQAGGSLRLSRTASGFTFDDSDMGWYRQAPGNERELVSTIRSDGSTYYVDSVKGRFTISQDNAKNTVYLQMNSLKPEDTAVYYCASLWLRRLVCWGQGTLVTVS

SEQ ID NO: 2943 - protein, 115 aa, synthetic construct
EVQLVESGGGSVQAGGSLRLSRTASGFTFDVSDMGWYRQAPGNERELVSTIRSDGSTYYVDSVKGRFTISQDNAKNTVYLQMNSLKPEDTAMYYCASLWLRRLVCWGQGTLVTVS

SEQ ID NO: 2944 - protein, 115 aa, synthetic construct
EVQVVESGGGSVEAGGSLRLSCTASGFTFDDSDMGWYRQAPGNERELVATIRSDGSTYYADSVKGRFTISQDNAKNTVYLQMNSLKPEDTAMYYCASLWLRRLVCWGQGTLVTVS

SEQ ID NO: 2945 - protein, 115 aa, synthetic construct
EVQVVESGGGSVEAGGSLRLSCTASGFTFDDSDMGWYRQAPGNERELVATIRSDGSTYYGDSVKGRFSISQDNAKNTIYLQMNSLKPEDTAMYYCASLWLRRLVCWGQGTLVTVS

SEQ ID NO: 2946 - protein, 115 aa, synthetic construct
EVQVVESGGGSVEAGGSLRLSCTASGFTFDDSDMGWYRQAPGNERELVATIRSDGSTYYGDSVKGRFSISQDNAKNTVYLQMNSLKPEDTAMYYCASLWLRRLVCWGQGTLVTVS

SEQ ID NO: 2947 - protein, 115 aa, synthetic construct
EVQVVESGGGSVEAGGSLRLSCTASGFTFDDSDMGWYRQAPGNERELVSTIRSDGSTYYADSVKGRFTISQDNAKNTIYLQMNSLKPEDTAMYYCASLWLRRLVCWGQGTLVTVS

SEQ ID NO: 2948 - protein, 115 aa, synthetic construct
EVQVVESGGGSVEAGGSLRLSCTASGFTFDDSDMGWYRQAPGNERELVSTIRSDGSTYYGDSVKGRFSISQDNAKNTVYLQMNSLKPEDTAMYYCASLWLRRLVCWGQGTLVTVS

SEQ ID NO: 2949 - protein, 115 aa, synthetic construct
EVQVVESGGGSVEAGGSLRLSCTASGFTFDDSDMGWYRQAPGNERELVSTIRSDGSTYYVDSVKGRFTISQDNAKNTIYLQMNSLKPEDTAMYYCASLWLRRLVCWGQGTLVTVS

SEQ ID NO: 2950 - protein, 115 aa, synthetic construct
EVQVVESGGGSVEAGGSLRLSCTASGFTFDDSDMGWYRQAPGNERELVSTIRSDGSTYYVDSVKGRFTISQDNAKNTVYLQMNSLKPEDTAMYYCASLWLRRLVCWGQGTLVTVS

SEQ ID NO: 2951 - protein, 115 aa, synthetic construct
EVQVVESGGGSVEAGGSLRLSCTASGFTFDDSDMGWYRQAPGNERELVSTIRSDGSTYYVDSVKGRFTISQDNAKNTVYLQMNSLKPEDTAVYYCASLWLRRLVCWGQGTLVTVS

SEQ ID NO: 2952 - protein, 115 aa, synthetic construct
EVQVVESGGGSVEAGGSLRLSCTASGFTFDDSDMGWYRQAPGNERELVSTISSDGSTYYADSVKGRFTISQDNAKNTVYLQMNSLKPEDTAMYYCASLWLRRLVCWGQGTLVTVS

SEQ ID NO: 2953 - protein, 115 aa, synthetic construct
EVQVVESGGGSVEAGGSLRLSCTASGFTFDDSDMGWYRQARGNERELVSTIRSDGSTYYVDSVKGRFTISQDNAKNTVYLQMNSLKPEDTAMYYCASLWLRRLVCWGQGTLVTVS

SEQ ID NO: 2954 - protein, 115 aa, synthetic construct
EVQVVESGGGSVEAGGSLRLSCTASGFTFDVSDMGWYRQAPGNERELVSTIRSDGSTYYVDSVKGRFTISQDNAKNTVYLQMNSLKPEDTAMYYCASLWLRRLVCWGQGTLVTVS

SEQ ID NO: 2955 - protein, 115 aa, synthetic construct
EVQVVESGGGSVEAGGSLRLSCTASGFTFDVSDMGWYRQAPGNERELVSTISSDGSTYYADSVKGRFTISQDNAKNTVYLQMNSLKPEDTAMYYCASLWLRRLVCWGQGTLVTVS

SEQ ID NO: 2956 - protein, 115 aa, synthetic construct
EVQVVESGGGSVQAGGSLRLSCTASGFTFDDSDMGWYRQAPGNERELVATIRSDGSAYYADSVKGRFTISQDNAKNTVYLQMNSLKPEDTAMYYCASLWLRRLVCWGQGTLVTVS

SEQ ID NO: 2957 - protein, 115 aa, synthetic construct
EVQVVESGGGSVQAGGSLRLSCTASGFTFDDSDMGWYRQAPGNERELVATIRSDGSTYYGDSVKGRFSISQDNAKNTIYLQMNSLKPEDTAMYYCASLWLRRLVCWGQGTLVTVS

SEQ ID NO: 2958 - protein, 115 aa, synthetic construct
EVQVVESGGGSVQAGGSLRLSCTASGFTFDDSDMGWYRQAPGNERELVATIRSDGSTYYGDSVKGRFSISQDNAKNTVYLQMNSLKPEDTAMYYCASLWLRRLVCWGQGTLVTVS

SEQ ID NO: 2959 - protein, 115 aa, synthetic construct
EVQVVESGGGSVQAGGSLRLSCTASGFTFDDSDMGWYRQAPGNERELVATIRSDGSTYYGDSVKGRFSISQDNAKNTVYLQMNSLKPEDTAVYYCASLWLRRLVCWGQGTLVTVS

SEQ ID NO: 2960 - protein, 115 aa, synthetic construct
EVQVVESGGGSVQAGGSLRLSCTASGFTFDDSDMGWYRQAPGNERELVATIRSDGSTYYGDSVKGRFTISQDNAKNTVYLQMNSLKPEDTAMYYCASLWLRRLVCWGQGTLVTVS

SEQ ID NO: 2961 - protein, 115 aa, synthetic construct
EVQVVESGGGSVQAGGSLRLSCTASGFTFDDSDMGWYRQAPGNERELVATIRSDGSTYYVDSVKGRFTISQDNAKNTVYLQMNSLKPEDTAMYYCASLWLRRLVCWGQGTLVTVS

SEQ ID NO: 2962 - protein, 115 aa, synthetic construct
EVQVVESGGGSVQAGGSLRLSCTASGFTFDDSDMGWYRQAPGNERELVATISSDGSAYYADSVKGRFTISQDNAKNTVYLQMNSLKPEDTAMYYCASLWLRRLVCWGQGTLVTVS

SEQ ID NO: 2963 - protein, 115 aa, synthetic construct
EVQVVESGGGSVQAGGSLRLSCTASGFTFDDSDMGWYRQAPGNERELVSTIRSDGSTYYADSVKGRFTISQDNAKNTIYLQMNSLKPEDTAMYYCASLWLRRLVCWGQGTLVTVS

SEQ ID NO: 2964 - protein, 115 aa, synthetic construct
EVQVVESGGGSVQAGGSLRLSCTASGFTFDDSDMGWYRQAPGNERELVSTIRSDGSTYYADSVKGRFTISQDNAKNTVYLQMNSLKPEDTAMYYCASLWLRRLVCWGQGTLVTVS

SEQ ID NO: 2965 - protein, 115 aa, synthetic construct
EVQVVESGGGSVQAGGSLRLSCTASGFTFDDSDMGWYRQAPGNERELVSTIRSDGSTYYADSVKGRFTISQDNAKNTVYLQMNSLKPEDTAVYYCASLWLRRLVCWGQGTLVTVS

SEQ ID NO: 2966 - protein, 115 aa, synthetic construct
EVQVVESGGGSVQAGGSLRLSCTASGFTFDDSDMGWYRQAPGNERELVSTIRSDGSTYYGDSVKGRFSISQDNAKNTVYLQMNSLKPEDTAMYYCASLWLRRLVCWGQGTLVTVS

SEQ ID NO: 2967 - protein, 115 aa, synthetic construct
EVQVVESGGGSVQAGGSLRLSCTASGFTFDDSDMGWYRQAPGNERELVSTIRSDGSTYYGDSVKGRFSISQDNAKNTVYLQMNSLKPEDTAVYYCASLWLRRLVCWGQGTLVTVS

SEQ ID NO: 2968 - protein, 115 aa, synthetic construct
EVQVVESGGGSVQAGGSLRLSCTASGFTFDDSDMGWYRQAPGNERELVSTIRSDGSTYYVDSVKGRFTISQDNAKNTIYLQMNSLKPEDTAMYYCASLWLRRLVCWGQGTLVTVS

SEQ ID NO: 2969 - protein, 115 aa, synthetic construct
EVQVVESGGGSVQAGGSLRLSCTASGFTFDDSDMGWYRQAPGNERELVSTIRSDGSTYYVDSVKGRFTISQDNAKNTVYLQMNSLKPEDTAMYYCASLWLRRLVCWGQGTLVTVS

SEQ ID NO: 2970 - protein, 115 aa, synthetic construct
EVQVVESGGGSVQAGGSLRLSCTASGFTFDDSDMGWYRQAPGNERELVSTIRSDGSTYYVDSVKGRFTISQDNAKNTVYLQMNSLKPEDTAVYYCASLWLRRLVCWGQGTLVTVS

SEQ ID NO: 2971 - protein, 115 aa, synthetic construct
EVQVVESGGGSVQAGGSLRLSCTASGFTFDDSDMGWYRQARGNERELVSTIRSDGSTYYADSVKGRFTISQDNAKNTVYLQMNSLKPEDTAMYYCASLWLRRLVCWGQGTLVTVS

SEQ ID NO: 2972 - protein, 115 aa, synthetic construct
EVQVVESGGGSVQAGGSLRLSCTASGFTFDDSDMGWYRQARGNERELVSTISSDGSTYYVDSVKGRFTISQDNAKNTVYLQMNSLKPEDTAMYYCASLWLRRLVCWGQGTLVTVS

SEQ ID NO: 2973 - protein, 115 aa, synthetic construct
EVQVVESGGGSVQAGGSLRLSCTASGFTFDVSDMGWYRQAPGNERELVATIRSDGSTYYGDSVKGRFSISQDNAKNTVYLQMNSLKPEDTAMYYCASLWLRRLVCWGQGTLVTVS

SEQ ID NO: 2974 - protein, 115 aa, synthetic construct
EVQVVESGGGSVQAGGSLRLSCTASGFTFDVSDMGWYRQAPGNERELVATIRSDGSTYYGDSVKGRFSISQDNAKNTVYLQMNSLKPEDTAVYYCASLWLRRLVCWGQGTLVTVS

SEQ ID NO: 2975 - protein, 115 aa, synthetic construct
EVQVVESGGGSVQAGGSLRLSCTASGFTFDVSDMGWYRQAPGNERELVATISSDGSTYYADSVKGRFTISQDNAKNTVYLQMNSLKPEDTAMYYCASLWLRRLVCWGQGTLVTVS

SEQ ID NO: 2976 - protein, 115 aa, synthetic construct
EVQVVESGGGSVQAGGSLRLSCTASGFTFDVSDMGWYRQAPGNERELVSTIRSDGSAYYADSVKGRFTISQDNAKNTVYLQMNSLKPEDTAMYYCASLWLRRLVCWGQGTLVTVS

SEQ ID NO: 2977 - protein, 115 aa, synthetic construct
EVQVVESGGGSVQAGGSLRLSCTASGFTFDVSDMGWYRQAPGNERELVSTIRSDGSTYYADSVKGRFTISQDNAKNTVYLQMNSLKPEDTAMYYCASLWLRRLVCWGQGTLVTVS

SEQ ID NO: 2978 - protein, 115 aa, synthetic construct
EVQVVESGGGSVQAGGSLRLSCTASGFTFDVSDMGWYRQAPGNERELVSTIRSDGSTYYGDSVKGRFSISQDNAKNTVYLQMNSLKPEDTAMYYCASLWLRRLVCWGQGTLVTVS

SEQ ID NO: 2979 - protein, 115 aa, synthetic construct
EVQVVESGGGSVQAGGSLRLSCTASGFTFDVSDMGWYRQAPGNERELVSTIRSDGSTYYVDSVKGRFTISQDNAKNTIYLQMNSLKPEDTAMYYCASLWLRRLVCWGQGTLVTVS

SEQ ID NO: 2980 - protein, 115 aa, synthetic construct
EVQVVESGGGSVQAGGSLRLSCTASGFTFDVSDMGWYRQAPGNERELVSTIRSDGSTYYVDSVKGRFTISQDNAKNTVYLQMNSLKPEDTAMYYCASLWLRRLVCWGQGTLVTVS

SEQ ID NO: 2981 - protein, 115 aa, synthetic construct
EVQVVESGGGSVQAGGSLRLSCTASGFTFDVSDMGWYRQAPGNERELVSTIRSDGSTYYVDSVKGRFTISQDNAKNTVYLQMNSLKPEDTAVYYCASLWLRRLVCWGQGTLVTVS

SEQ ID NO: 2982 - protein, 115 aa, synthetic construct
EVQVVESGGGSVQAGGSLRLSCTASGFTFDVSDMGWYRQAPGNERELVSTISSDGSTYYADSVKGRFTISQDNAKNTVYLQMNSLKPEDTAMYYCASLWLRRLVCWGQGTLVTVS

SEQ ID NO: 2983 - protein, 115 aa, synthetic construct
EVQVVESGGGSVQAGGSLRLSCTASGFTFDVSDMGWYRQAPGNERELVSTISSDGSTYYADSVKGRFTISQDNAKNTVYLQMNSLKPEDTAVYYCASLWLRRLVCWGQGTLVTVS

SEQ ID NO: 2984 - protein, 115 aa, synthetic construct
EVQVVESGGGSVQAGGSLRLSCTASGFTFDVSDMGWYRQAPGNERELVSTISSDGSTYYGDSVKGRFSISQDNAKNTVYLQMNSLKPEDTAMYYCASLWLRRLVCWGQGTLVTVS

SEQ ID NO: 2985 - protein, 115 aa, synthetic construct
EVQVVESGGGSVQAGGSLRLSCTASGFTFDVSDMGWYRQAPGNERELVSTISSDGSTYYVDSVKGRFTISQDNAKNTVYLQMNSLKPEDTAMYYCASLWLRRLVCWGQGTLVTVS

SEQ ID NO: 2986 - protein, 115 aa, synthetic construct
EVQVVESGGGSVQAGGSLRLSCTASGFTFDVSDMGWYRQARGNERELVSTIRSDGSTYYVDSVKGRFTISQDNAKNTVYLQMNSLKPEDTAMYYCASLWLRRLVCWGQGTLVTVS

SEQ ID NO: 2987 - protein, 115 aa, synthetic construct
EVQVVESGGGSVQAGGSLRLSRTASGFTFDDSDMGWYRQAPGNERELVATIRSDGSAYYADSVKGRFTISQDNAKNTVYLQMNSLKPEDTAMYYCASLWLRRLVCWGQGTLVTVS

SEQ ID NO: 2988 - protein, 115 aa, synthetic construct
EVQVVESGGGSVQAGGSLRLSRTASGFTFDDSDMGWYRQAPGNERELVATIRSDGSTYYGDSVKGRFSISQDNAKNTIYLQMNSLKPEDTAMYYCASLWLRRLVCWGQGTLVTVS

SEQ ID NO: 2989 - protein, 115 aa, synthetic construct
EVQVVESGGGSVQAGGSLRLSRTASGFTFDDSDMGWYRQAPGNERELVATIRSDGSTYYGDSVKGRFSISQDNAKNTVYLQMNSLKPEDTAMYYCASLWLRRLVCWGQGTLVTVS

SEQ ID NO: 2990 - protein, 115 aa, synthetic construct
EVQVVESGGGSVQAGGSLRLSRTASGFTFDDSDMGWYRQAPGNERELVATIRSDGSTYYGDSVKGRFSISQDNAKNTVYLQMNSLKPEDTAVYYCASLWLRRLVCWGQGTLVTVS

SEQ ID NO: 2991 - protein, 115 aa, synthetic construct
EVQVVESGGGSVQAGGSLRLSRTASGFTFDDSDMGWYRQAPGNERELVATIRSDGSTYYGDSVKGRFTISQDNAKNTIYLQMNSLKPEDTAMYYCASLWLRRLVCWGQGTLVTVS

SEQ ID NO: 2992 - protein, 115 aa, synthetic construct
EVQVVESGGGSVQAGGSLRLSRTASGFTFDDSDMGWYRQAPGNERELVATIRSDGSTYYGDSVKGRFTISQDNAKNTVYLQMNSLKPEDTAMYYCASLWLRRLVCWGQGTLVTVS

SEQ ID NO: 2993 - protein, 115 aa, synthetic construct
EVQVVESGGGSVQAGGSLRLSRTASGFTFDDSDMGWYRQAPGNERELVATIRSDGSTYYGDSVKGRFTISQDNAKNTVYLQMNSLKPEDTAVYYCASLWLRRLVCWGQGTLVTVS

SEQ ID NO: 2994 - protein, 115 aa, synthetic construct
EVQVVESGGGSVQAGGSLRLSRTASGFTFDDSDMGWYRQAPGNERELVATISSDGSAYYADSVKGRFTISQDNAKNTVYLQMNSLKPEDTAMYYCASLWLRRLVCWGQGTLVTVS

SEQ ID NO: 2995 - protein, 115 aa, synthetic construct
EVQVVESGGGSVQAGGSLRLSRTASGFTFDDSDMGWYRQAPGNERELVSTIRSDGSTYYADSVKGRFTISQDNAKNTIYLQMNSLKPEDTAMYYCASLWLRRLVCWGQGTLVTVS

SEQ ID NO: 2996 - protein, 115 aa, synthetic construct
EVQVVESGGGSVQAGGSLRLSRTASGFTFDDSDMGWYRQAPGNERELVSTIRSDGSTYYVDSVKGRFTISQDNAKNTIYLQMNSLKPEDTAMYYCASLWLRRLVCWGQGTLVTVS

SEQ ID NO: 2997 - protein, 115 aa, synthetic construct
EVQVVESGGGSVQAGGSLRLSRTASGFTFDDSDMGWYRQAPGNERELVSTIRSDGSTYYVDSVKGRFTISQDNAKNTVYLQMNSLKPEDTAMYYCASLWLRRLVCWGQGTLVTVS

SEQ ID NO: 2998 - protein, 111 aa, synthetic construct
EVKVVESGGGSVQAGGSLRLSCTASGFTFDVSDMGWYRQAPGNERELVSTISSDGSAYYADSVKGRFTISQDNAKNTVYLQMNSLKPEDTAVYYCAADWPPGGQGTLVTVS

SEQ ID NO: 2999 - protein, 111 aa, synthetic construct
EVQLVESGGGSVEAGGSLRLSCTASGFTFDDSDMGWYRQAPGNECELVSTISSDGSAYYADSVKGRFTISQDNAKNTVYLQMNSLKPEDTAVYYCAADWPPGGQGTLVTVS

SEQ ID NO: 3000 - protein, 111 aa, synthetic construct
EVQLVESGGGSVEAGGSLRLSCTASGFTFDDSDMGWYRQAPGNECELVSTISSDGSTYYADSVKGRFTISQDNAKNTVYLQMNSLKPEDTAVYYCAADWPPGGQGTLVTVS

SEQ ID NO: 3001 - protein, 111 aa, synthetic construct
EVQLVESGGGSVEAGGSLRLSCTASGFTFDDSDMGWYRQAPGNECELVSTVSSDGSAYYADSVKGRFTISQDNAKNTVYLQMNSLKPEDTAVYYCAADWPPGGQGTLVTVS

SEQ ID NO: 3002 - protein, 111 aa, synthetic construct
EVQLVESGGGSVEAGGSLRLSCTASGFTFDDSDMGWYRQAPGNECELVSTVSSDGSTYYADSVKGRFTISQDNAKNTVYLQMNSLKPEDTAVYYCAADWPPGGQGTLVTVS

SEQ ID NO: 3003 - protein, 111 aa, synthetic construct
EVQLVESGGGSVEAGGSLRLSCTASGFTFDDSDMGWYRQAPGNERELVATISSDGSAYYADSVKGRFTISQDNAKNTVYLQMNSLKPEDTAVYYCAADWPPGGQGTLVTVS

SEQ ID NO: 3004 - protein, 111 aa, synthetic construct
EVQLVESGGGSVEAGGSLRLSCTASGFTFDDSDMGWYRQAPGNERELVATISSDGSTYYADSVKGRFTISQDNAKNTVYLQMNSLKPEDTAVYYCAADWPPGGQGTLVTVS

SEQ ID NO: 3005 - protein, 111 aa, synthetic construct
EVQLVESGGGSVEAGGSLRLSCTASGFTFDDSDMGWYRQAPGNERELVSTIRSDGSAYYADSVKGRFTISQDNAKNTIYLQMNSLKPEDTAMYYCAADWPPGGQGTLVTVS

SEQ ID NO: 3006 - protein, 111 aa, synthetic construct
EVQLVESGGGSVEAGGSLRLSCTASGFTFDDSDMGWYRQAPGNERELVSTISSDGSAYYADSVKGRFSISQDNAKNTVYLQMNSLKPEDTAVYYCAADWPPGGQGTLVTVS

SEQ ID NO: 3007 - protein, 111 aa, synthetic construct
EVQLVESGGGSVEAGGSLRLSCTASGFTFDDSDMGWYRQAPGNERELVSTISSDGSAYYADSVKGRFTISQDNAKNTIYLQMNSLKPEDTAMYYCAADWPPGGQGTLVTVS

SEQ ID NO: 3008 - protein, 111 aa, synthetic construct
EVQLVESGGGSVEAGGSLRLSCTASGFTFDDSDMGWYRQAPGNERELVSTISSDGSAYYADSVKGRFTISQDNAKNTIYLQMNSLKPEDTAVYYCAADWPPGGQGTLVTVS

SEQ ID NO: 3009 - protein, 111 aa, synthetic construct
EVQLVESGGGSVEAGGSLRLSCTASGFTFDDSDMGWYRQAPGNERELVSTISSDGSAYYADSVKGRFTISQDNAKNTVYLQMNSLKPEDTAMYYCAADWPPGGQGTLVTVS

SEQ ID NO: 3010 - protein, 111 aa, synthetic construct
EVQLVESGGGSVEAGGSLRLSCTASGFTFDDSDMGWYRQAPGNERELVSTISSDGSAYYADSVKGRFTISQDNAKNTVYLQMNSLKPEDTAVYYCAADWPPGGQGTLVTVS

SEQ ID NO: 3011 - protein, 111 aa, synthetic construct
EVQLVESGGGSVEAGGSLRLSCTASGFTFDDSDMGWYRQAPGNERELVSTISSDGSTYYADSVKGRFTISQDNAKNTIYLQMNSLKPEDTAVYYCAADWPPGGQGTLVTVS

SEQ ID NO: 3012 - protein, 111 aa, synthetic construct
EVQLVESGGGSVEAGGSLRLSCTASGFTFDDSDMGWYRQAPGNERELVSTISSDGSTYYADSVKGRFTISQDNAKNTVYLQMNSLKPEDTAVYYCAADWPPGGQGTLVTVS

SEQ ID NO: 3013 - protein, 111 aa, synthetic construct
EVQLVESGGGSVEAGGSLRLSCTASGFTFDDSDMGWYRQAPGNERELVSTVSSDGSAYYADSVKGRFTISQDNAKNTVYLQMNSLKPEDTAVYYCAADWPPGGQGTLVTVS

SEQ ID NO: 3014 - protein, 111 aa, synthetic construct
EVQLVESGGGSVEAGGSLRLSCTASGFTFDDSDMGWYRQARGNERELVSTISSDGGTYYADSVKGRFTISQDNAKNTVYLQMNSLKPEDTAVYYCAADWPPGGQGTLVTVS

SEQ ID NO: 3015 - protein, 111 aa, synthetic construct
EVQLVESGGGSVEAGGSLRLSCTASGFTFDDSDMGWYRQARGNERELVSTISSDGSAYYADSVKGRFTISQDNAKNTIYLQMNSLKPEDTAVYYCAADWPPGGQGTLVTVS

SEQ ID NO: 3016 - protein, 111 aa, synthetic construct
EVQLVESGGGSVEAGGSLRLSCTASGFTFDDSDMGWYRQARGNERELVSTISSDGSAYYADSVKGRFTISQDNAKNTVYLQMNSLKPEDTAVYYCAADWPPGGQGTLVTVS

SEQ ID NO: 3017 - protein, 111 aa, synthetic construct
EVQLVESGGGSVEAGGSLRLSCTASGFTFDDSDMGWYRQARGNERELVSTISSDGSTYYADSVKGRFTISQDNAKNTIYLQMNSLKPEDTAVYYCAADWPPGGQGTLVTVS

SEQ ID NO: 3018 - protein, 111 aa, synthetic construct
EVQLVESGGGSVEAGGSLRLSCTASGFTFDDSDMGWYRQARGNERELVSTISSDGSTYYADSVKGRFTISQDNAKNTVYLQMNSLKPEDTAVYYCAADWPPGGQGTLVTVS

SEQ ID NO: 3019 - protein, 111 aa, synthetic construct
EVQLVESGGGSVEAGGSLRLSCTASGFTFDVSDMGWYRQAPGNECELVSTVSSDGSAYYADSVKGRFTISQDNAKNTVYLQMNSLKPEDTAVYYCAADWPPGGQGTLVTVS

SEQ ID NO: 3020 - protein, 111 aa, synthetic construct
EVQLVESGGGSVEAGGSLRLSCTASGFTFDVSDMGWYRQAPGNERELVATISSDGSAYYADSVKGRFTISQDNAKNTVYLQMNSLKPEDTAVYYCAADWPPGGQGTLVTVS

SEQ ID NO: 3021 - protein, 111 aa, synthetic construct
EVQLVESGGGSVEAGGSLRLSCTASGFTFDVSDMGWYRQAPGNERELVSTISSDGSAYYADSVKGRFSISQDNAKNTVYLQMNSLKPEDTAVYYCAADWPPGGQGTLVTVS

SEQ ID NO: 3022 - protein, 111 aa, synthetic construct
EVQLVESGGGSVEAGGSLRLSCTASGFTFDVSDMGWYRQAPGNERELVSTISSDGSAYYADSVKGRFTISQDNAKNTIYLQMNSLKPEDTAVYYCAADWPPGGQGTLVTVS

SEQ ID NO: 3023 - protein, 111 aa, synthetic construct
EVQLVESGGGSVEAGGSLRLSCTASGFTFDVSDMGWYRQAPGNERELVSTISSDGSAYYADSVKGRFTISQDNAKNTVYLQMNSLKPEDTAMYYCAADWPPGGQGTLVTVS

SEQ ID NO: 3024 - protein, 111 aa, synthetic construct
EVQLVESGGGSVEAGGSLRLSCTASGFTFDVSDMGWYRQAPGNERELVSTISSDGSAYYADSVKGRFTISQDNAKNTVYLQMNSLKPEDTAVYYCAADWPPGGQGTLVTVS

SEQ ID NO: 3025 - protein, 111 aa, synthetic construct
EVQLVESGGGSVEAGGSLRLSCTASGFTFDVSDMGWYRQARGNERELVSTISSDGSTYYADSVKGRFTISQDNAKNTVYLQMNSLKPEDTAVYYCAADWPPGGQGTLVTVS

SEQ ID NO: 3026 - protein, 111 aa, synthetic construct
EVQLVESGGGSVEAGGSLRLSRTASGFTFDDSDMGWYRQAPGNERELVATISSDGSAYYADSVKGRFTISQDNAKNTVYLQMNSLKPEDTAVYYCAADWPPGGQGTLVTVS

SEQ ID NO: 3027 - protein, 111 aa, synthetic construct
EVQLVESGGGSVEAGGSLRLSRTASGFTFDDSDMGWYRQAPGNERELVSTISSDGSAYYADSVKGRFTISQDNAKNTVYLQMNSLKPEDTAVYYCAADWPPGGQGTLVTVS

SEQ ID NO: 3028 - protein, 111 aa, synthetic construct
EVQLVESGGGSVEAGGSLRLSRTASGFTFDDSDMGWYRQAPGNERELVSTISSDGSTYYADSVKGRFTISQDNAKNTVYLQMNSLKPEDTAVYYCAADWPPGGQGTLVTVS

SEQ ID NO: 3029 - protein, 111 aa, synthetic construct
EVQLVESGGGSVEAGGSLRLSRTASGFTFDDSDMGWYRQARGNERELVSTISSDGSAYYADSVKGRFTISQDNAKNTVYLQMNSLKPEDTAVYYCAADWPPGGQGTLVTVS

SEQ ID NO: 3030 - protein, 111 aa, synthetic construct
EVQLVESGGGSVEAGGSLRLSRTASGFTFDVSDMGWYRQAPGNERELVSTISSDGSAYYADSVKGRFTISQDNAKNTVYLQMNSLKPEDTAVYYCAADWPPGGQGTLVTVS

SEQ ID NO: 3031 - protein, 111 aa, synthetic construct
EVQLVESGGGSVQAGGSLRLPCTASGFTFDVSDMGWYRQAPGNERELVSTISSDGSAYYADSVKGRFTISQDNAKNTVYLQMNSLKPEDTAVYYCAADWPPGGQGTLVTVS

SEQ ID NO: 3032 - protein, 111 aa, synthetic construct
EVQLVESGGGSVQAGGSLRLSCTASGFTFDDSDMGWNRQARGNERELVSTISSDGSTYYADSVKGRFTISQDNAKNTVYLQMNSLKPEDTAVYYCAADWPPGGQGTLVTVS

SEQ ID NO: 3033 - protein, 111 aa, synthetic construct
EVQLVESGGGSVQAGGSLRLSCTASGFTFDDSDMGWYRQAPGNECELVSTISSDGSAYYADSVKGRFTISQDNAKNTVYLQMNSLKPEDTAVYYCAADWPPGGQGTLVTVS

SEQ ID NO: 3034 - protein, 111 aa, synthetic construct
EVQLVESGGGSVQAGGSLRLSCTASGFTFDDSDMGWYRQAPGNECELVSTISSDGSTYYADSVKGRFTISQDNAKNTVYLQMNSLKPEDTAVYYCAADWPPGGQGTLVTVS

SEQ ID NO: 3035 - protein, 111 aa, synthetic construct
EVQLVESGGGSVQAGGSLRLSCTASGFTFDDSDMGWYRQAPGNECELVSTVSSDGGTYYADSVKGRFTISQDNAKNTVYLQMNSLKPEDTAVYYCAADWPPGGQGTLVTVS

SEQ ID NO: 3036 - protein, 111 aa, synthetic construct
EVQLVESGGGSVQAGGSLRLSCTASGFTFDDSDMGWYRQAPGNECELVSTVSSDGRTYYADSVKGRFTISQDNAKNTVYLQMNSLKPEDTAVYYCAADWPPGGQGTLVTVS

SEQ ID NO: 3037 - protein, 111 aa, synthetic construct
EVQLVESGGGSVQAGGSLRLSCTASGFTFDDSDMGWYRQAPGNECELVSTVSSDGSAYYADSVKGRFTISQDNAKNTIYLQMNSLKPEDTAVYYCAADWPPGGQGTLVTVS

SEQ ID NO: 3038 - protein, 111 aa, synthetic construct
EVQLVESGGGSVQAGGSLRLSCTASGFTFDDSDMGWYRQAPGNECELVSTVSSDGSAYYADSVKGRFTISQDNAKNTVYLQMNSLKPEDTAVYYCAADWPPGGQGTLVTVS

SEQ ID NO: 3039 - protein, 111 aa, synthetic construct
EVQLVESGGGSVQAGGSLRLSCTASGFTFDDSDMGWYRQAPGNECELVSTVSSDGSTYYADSVKGRFTISQDNAKNTVYLQMNSLKPEDTAVYYCAADWPPGGQGTLVTVS

SEQ ID NO: 3040 - protein, 111 aa, synthetic construct
EVQLVESGGGSVQAGGSLRLSCTASGFTFDDSDMGWYRQAPGNERELVATIRSDGSAYYADSVKGRFSISQDNAKNTVYLQMNSLKPEDTAVYYCAADWPPGGQGTLVTVS

SEQ ID NO: 3041 - protein, 111 aa, synthetic construct
EVQLVESGGGSVQAGGSLRLSCTASGFTFDDSDMGWYRQAPGNERELVATISSDGSAYYADSVKGRFSISQDNAKNTVYLQMNSLKPEDTAVYYCAADWPPGGQGTLVTVS

SEQ ID NO: 3042 - protein, 111 aa, synthetic construct
EVQLVESGGGSVQAGGSLRLSCTASGFTFDDSDMGWYRQAPGNERELVATISSDGSAYYADSVKGRFTISQDNAKNTVYLQMNSLKPEDTAMYYCAADWPPGGQGTLVTVS

SEQ ID NO: 3043 - protein, 111 aa, synthetic construct
EVQLVESGGGSVQAGGSLRLSCTASGFTFDDSDMGWYRQAPGNERELVATISSDGSAYYADSVKGRFTISQDNAKNTVYLQMNSLKPEDTAVYYCAADWPPGGQGTLVTVS

SEQ ID NO: 3044 - protein, 111 aa, synthetic construct
EVQLVESGGGSVQAGGSLRLSCTASGFTFDDSDMGWYRQAPGNERELVATISSDGSTYYADSVKGRFTISQDNAKNTVYLQMNSLKPEDTAMYYCAADWPPGGQGTLVTVS

SEQ ID NO: 3045 - protein, 111 aa, synthetic construct
EVQLVESGGGSVQAGGSLRLSCTASGFTFDDSDMGWYRQAPGNERELVATISSDGSTYYADSVKGRFTISQDNAKNTVYLQMNSLKPEDTAVYYCAADWPPGGQGTLVTVS

SEQ ID NO: 3046 - protein, 111 aa, synthetic construct
EVQLVESGGGSVQAGGSLRLSCTASGFTFDDSDMGWYRQAPGNERELVSTIFSDGSAYYADSVKGRFTISQDNAKNTVYLQMNSLKPEDTAVYYCAADWPPGGQGTLVTVS

SEQ ID NO: 3047 - protein, 111 aa, synthetic construct
EVQLVESGGGSVQAGGSLRLSCTASGFTFDDSDMGWYRQAPGNERELVSTIRSDGSAYYADSVKGRFSISQDNAKNTVYLQMNSLKPEDTAVYYCAADWPPGGQGTLVTVS

SEQ ID NO: 3048 - protein, 111 aa, synthetic construct
EVQLVESGGGSVQAGGSLRLSCTASGFTFDDSDMGWYRQAPGNERELVSTISSDGSAYYADSVKGRFSISQDNAKNTVYLQMNSLKPEDTAVYYCAADWPPGGQGTLVTVS

SEQ ID NO: 3049 - protein, 111 aa, synthetic construct
EVQLVESGGGSVQAGGSLRLSCTASGFTFDDSDMGWYRQAPGNERELVSTISSDGSAYYADSVKGRFTISQANAKNTVYLQMNSLKPEDTAVYYCAADWPPGGQGTLVTVS

SEQ ID NO: 3050 - protein, 111 aa, synthetic construct
EVQLVESGGGSVQAGGSLRLSCTASGFTFDDSDMGWYRQAPGNERELVSTISSDGSAYYADSVKGRFTISQDNAKNTIYLQMNSLKPEDTAMYYCAADWPPGGQGTLVTVS

SEQ ID NO: 3051 - protein, 111 aa, synthetic construct
EVQLVESGGGSVQAGGSLRLSCTASGFTFDDSDMGWYRQAPGNERELVSTISSDGSAYYADSVKGRFTISQDNAKNTIYLQMNSLKPEDTAVYYCAADWPPGGQGTLVTVS

SEQ ID NO: 3052 - protein, 111 aa, synthetic construct
EVQLVESGGGSVQAGGSLRLSCTASGFTFDDSDMGWYRQAPGNERELVSTISSDGSAYYADSVKGRFTISQDNAKNTVYLQMNSLKPEDTAMYYCAADWPPGGQGTLVTVS

SEQ ID NO: 3053 - protein, 111 aa, synthetic construct
EVQLVESGGGSVQAGGSLRLSCTASGFTFDDSDMGWYRQAPGNERELVSTISSDGSAYYADSVKGRFTISQDNAKNTVYLQMNSLKPEDTAVYYCAADWPPGGPGTLVTVS

SEQ ID NO: 3054 - protein, 111 aa, synthetic construct
EVQLVESGGGSVQAGGSLRLSCTASGFTFDDSDMGWYRQAPGNERELVSTISSDGSAYYADSVKGRFTISQDNAKNTVYLQMNSLKPEDTAVYYCAADWPPGGQGALVTVS

SEQ ID NO: 3055 - protein, 111 aa, synthetic construct
EVQLVESGGGSVQAGGSLRLSCTASGFTFDDSDMGWYRQAPGNERELVSTISSDGSAYYADSVKGRFTISQDNAKNTVYLQMNSLKPEDTAVYYCAADWPPGGQVTLVTVS

SEQ ID NO: 3056 - protein, 111 aa, synthetic construct
EVQLVESGGGSVQAGGSLRLSCTASGFTFDDSDMGWYRQAPGNERELVSTISSDGSTYYADSVKGRFTISQDNAKNTIYLQMNSLKPEDTAVYYCAADWPPGGQGTLVTVS

SEQ ID NO: 3057 - protein, 111 aa, synthetic construct
EVQLVESGGGSVQAGGSLRLSCTASGFTFDDSDMGWYRQAPGNERELVSTISSDGSTYYADSVKGRFTISQDNAKNTVYLQMNSLKPEDTAMYYCAADWPPGGQGTLVTVS

SEQ ID NO: 3058 - protein, 111 aa, synthetic construct
EVQLVESGGGSVQAGGSLRLSCTASGFTFDDSDMGWYRQAPGNERELVSTISSDGSTYYADSVKGRFTISQDNAKNTVYLQMNSLKPEDTAVYYCAADWPPGGQGTLVTVS

SEQ ID NO: 3059 - protein, 111 aa, synthetic construct
EVQLVESGGGSVQAGGSLRLSCTASGFTFDDSDMGWYRQARGNECELVSTISSDGSAYYADSVKGRFTISQDNAKNTVYLQMNSLKPEDTAVYYCAADWPPGGQGTLVTVS

SEQ ID NO: 3060 - protein, 111 aa, synthetic construct
EVQLVESGGGSVQAGGSLRLSCTASGFTFDDSDMGWYRQARGNEREHVSTISSDGSTYYADSVKGRFTISQDNAKNTVYLQMNSLKPEDTAVYYCAADWPPGGQGTLVTVS

SEQ ID NO: 3061 - protein, 111 aa, synthetic construct
EVQLVESGGGSVQAGGSLRLSCTASGFTFDDSDMGWYRQARGNERELVATISSDGSAYYADSVKGRFTISQDNAKNTVYLQMNSLKPEDTAVYYCAADWPPGGQGTLVTVS

SEQ ID NO: 3062 - protein, 111 aa, synthetic construct
EVQLVESGGGSVQAGGSLRLSCTASGFTFDDSDMGWYRQARGNERELVATISSDGSTYYADSVKGRFTISQDNAKNTVYLQMNSLKPEDTAVYYCAADWPPGGQGTLVTVS

SEQ ID NO: 3063 - protein, 111 aa, synthetic construct
EVQLVESGGGSVQAGGSLRLSCTASGFTFDDSDMGWYRQARGNERELVATISSDGSTYYVDSVKGRFTISQDNAKNTVYLQMNSLKPEDTAVYYCAADWPPGGQGTLVTVS

SEQ ID NO: 3064 - protein, 111 aa, synthetic construct
EVQLVESGGGSVQAGGSLRLSCTASGFTFDDSDMGWYRQARGNERELVSTISSDGGTYYADSVKGRFTISQDNAKNTVYLQMNSLKPEDTAVYYCAADWPPGGQGTLVTVS

SEQ ID NO: 3065 - protein, 111 aa, synthetic construct
EVQLVESGGGSVQAGGSLRLSCTASGFTFDDSDMGWYRQARGNERELVSTISSDGSAYYADSVKGRFSISQDNAKNTVYLQMNSLKPEDTAVYYCAADWPPGGQGTLVTVS

SEQ ID NO: 3066 - protein, 111 aa, synthetic construct
EVQLVESGGGSVQAGGSLRLSCTASGFTFDDSDMGWYRQARGNERELVSTISSDGSAYYADSVKGRFTISQDNAKNTIYLQMNSLKPEDTAMYYCAADWPPGGQGTLVTVS

SEQ ID NO: 3067 - protein, 111 aa, synthetic construct
EVQLVESGGGSVQAGGSLRLSCTASGFTFDDSDMGWYRQARGNERELVSTISSDGSAYYADSVKGRFTISQDNAKNTIYLQMNSLKPEDTAVYYCAADWPPGGQGTLVTVS

SEQ ID NO: 3068 - protein, 111 aa, synthetic construct
EVQLVESGGGSVQAGGSLRLSCTASGFTFDDSDMGWYRQARGNERELVSTISSDGSAYYADSVKGRFTISQDNAKNTVYLQMNSLKPEDTAMYYCAADWPPGGQGTLVTVS

SEQ ID NO: 3069 - protein, 111 aa, synthetic construct
EVQLVESGGGSVQAGGSLRLSCTASGFTFDDSDMGWYRQARGNERELVSTISSDGSAYYADSVKGRFTISQDNAKNTVYLQMNSLKPEDTAVYYCAADWPPGGQGTLVTVS

SEQ ID NO: 3070 - protein, 111 aa, synthetic construct
EVQLVESGGGSVQAGGSLRLSCTASGFTFDDSDMGWYRQARGNERELVSTISSDGSTYYADSVKGRFSISQDNAKNTVYLQMNSLKPEDTAVYYCAADWPPGGQGTLVTVS

SEQ ID NO: 3071 - protein, 111 aa, synthetic construct
EVQLVESGGGSVQAGGSLRLSCTASGFTFDDSDMGWYRQARGNERELVSTISSDGSTYYADSVKGRFTISQDNAKNTIYLQMNSLKPEDTAMYYCAADWPPGGQGTLVTVS

SEQ ID NO: 3072 - protein, 111 aa, synthetic construct
EVQLVESGGGSVQAGGSLRLSCTASGFTFDDSDMGWYRQARGNERELVSTISSDGSTYYADSVKGRFTISQDNAKNTIYLQMNSLKPEDTAVYYCAADWPPGGQGTLVTVS

SEQ ID NO: 3073 - protein, 111 aa, synthetic construct
EVQLVESGGGSVQAGGSLRLSCTASGFTFDDSDMGWYRQARGNERELVSTISSDGSTYYADSVKGRFTISQDNAKNTVYLQMNSLKPEDTAMYYCAADWPPGGQGTLVTVS

SEQ ID NO: 3074 - protein, 111 aa, synthetic construct
EVQLVESGGGSVQAGGSLRLSCTASGFTFDDSDMGWYRQARGNERELVSTISSDGSTYYADSVKGRFTISQDNAKNTVYLQMNSLKPEDTAVYYCAADWPPGGQGTLVTVS

SEQ ID NO: 3075 - protein, 111 aa, synthetic construct
EVQLVESGGGSVQAGGSLRLSCTASGFTFDDSDMGWYRQARGNERELVSTISSDGSTYYGDSVKGRFTISQDNAKNTVYLQMNSLKPEDTAVYYCAADWPPGGQGTLVTVS

SEQ ID NO: 3076 - protein, 111 aa, synthetic construct
EVQLVESGGGSVQAGGSLRLSCTASGFTFDDSDMGWYRQARGNERELVSTISSDGSTYYVDSVKGRFTISQDNAKNTIYLQMNSLKPEDTAVYYCAADWPPGGQGTLVTVS

SEQ ID NO: 3077 - protein, 111 aa, synthetic construct
EVQLVESGGGSVQAGGSLRLSCTASGFTFDDSDMGWYRQARGNERELVSTISSDGSTYYVDSVKGRFTISQDNAKNTVYLQMNSLKPEDTAVYYCAADWPPGGQGTLVTVS

SEQ ID NO: 3078 - protein, 111 aa, synthetic construct
EVQLVESGGGSVQAGGSLRLSCTASGFTFDDSDMGWYRQARGNERELVSTVSSDGSAYYADSVKGRFTISQDNAKNTVYLQMNSLKPEDTAVYYCAADWPPGGQGTLVTVS

SEQ ID NO: 3079 - protein, 111 aa, synthetic construct
EVQLVESGGGSVQAGGSLRLSCTASGFTFDDSDMGWYRQARGNERELVSTVSSDGSTYYADSVKGRFTISQDNAKNTVYLQMNSLKPEDTAVYYCAADWPPGGQGTLVTVS

SEQ ID NO: 3080 - protein, 111 aa, synthetic construct
EVQLVESGGGSVQAGGSLRLSCTASGFTFDVSDMGWYRQAPGNECELVSTISSDGSAYYADSVKGRFTISQDNAKNTVYLQMNSLKPEDTAVYYCAADWPPGGQGTLVTVS

SEQ ID NO: 3081 - protein, 111 aa, synthetic construct
EVQLVESGGGSVQAGGSLRLSCTASGFTFDVSDMGWYRQAPGNECELVSTVSSDGSAYYADSVKGRFTISQDNAKNTVYLQMNSLKPEDTAVYYCAADWPPGGQGTLVTVS

SEQ ID NO: 3082 - protein, 111 aa, synthetic construct
EVQLVESGGGSVQAGGSLRLSCTASGFTFDVSDMGWYRQAPGNERELVATISSDGSAYYADSVKGRFTISQDNAKNTVYLQMNSLKPEDTAVYYCAADWPPGGQGTLVTVS

SEQ ID NO: 3083 - protein, 111 aa, synthetic construct
EVQLVESGGGSVQAGGSLRLSCTASGFTFDVSDMGWYRQAPGNERELVSTIFSDGSAYYADSVKGRFTISQDNAKNTVYLQMNSLKPEDTAVYYCAADWPPGGQGTLVTVS

SEQ ID NO: 3084 - protein, 111 aa, synthetic construct
EVQLVESGGGSVQAGGSLRLSCTASGFTFDVSDMGWYRQAPGNERELVSTISSDGSAYYADSVKGRFSISQDNAKNTIYLQMNSLKPEDTAVYYCAADWPPGGQGTLVTVS

SEQ ID NO: 3085 - protein, 111 aa, synthetic construct
EVQLVESGGGSVQAGGSLRLSCTASGFTFDVSDMGWYRQAPGNERELVSTISSDGSAYYADSVKGRFSISQDNAKNTVYLQMNSLKPEDTAMYYCAADWPPGGQGTLVTVS

SEQ ID NO: 3086 - protein, 111 aa, synthetic construct
EVQLVESGGGSVQAGGSLRLSCTASGFTFDVSDMGWYRQAPGNERELVSTISSDGSAYYADSVKGRFSISQDNAKNTVYLQMNSLKPEDTAVYYCAADWPPGGQGTLVTVS

SEQ ID NO: 3087 - protein, 111 aa, synthetic construct
EVQLVESGGGSVQAGGSLRLSCTASGFTFDVSDMGWYRQAPGNERELVSTISSDGSAYYADSVKGRFTISQDNAKNTIYLQMNSLKPEDTAMYYCAADWPPGGQGTLVTVS

SEQ ID NO: 3088 - protein, 111 aa, synthetic construct
EVQLVESGGGSVQAGGSLRLSCTASGFTFDVSDMGWYRQAPGNERELVSTISSDGSAYYADSVKGRFTISQDNAKNTIYLQMNSLKPEDTAVYYCAADWPPGGQGTLVTVS

SEQ ID NO: 3089 - protein, 111 aa, synthetic construct
EVQLVESGGGSVQAGGSLRLSCTASGFTFDVSDMGWYRQAPGNERELVSTISSDGSAYYADSVKGRFTISQDNAKNTVYLQMNSLKPEDTAMYYCAADWPPGGQGTLVTVS

SEQ ID NO: 3090 - protein, 111 aa, synthetic construct
EVQLVESGGGSVQAGGSLRLSCTASGFTFDVSDMGWYRQAPGNERELVSTISSDGSAYYADSVKGRFTISQDNAKNTVYLQMNSLKPEDTAVYYCAADWPPGGPGTLVTVS

SEQ ID NO: 3091 - protein, 111 aa, synthetic construct
EVQLVESGGGSVQAGGSLRLSCTASGFTFDVSDMGWYRQAPGNERELVSTISSDGSAYYADSVKGRFTISQDNAKNTVYLQMNSLKPEDTAVYYCAADWPPGGQGTLVTVS

SEQ ID NO: 3092 - protein, 111 aa, synthetic construct
EVQLVESGGGSVQAGGSLRLSCTASGFTFDVSDMGWYRQAPGNERELVSTISSDGSAYYADSVKGRFTISQDNAKNTVYLQMNSLKPEDTAVYYCAADWPPGGQGTRVTVS

SEQ ID NO: 3093 - protein, 111 aa, synthetic construct
EVQLVESGGGSVQAGGSLRLSCTASGFTFDVSDMGWYRQAPGNERELVSTISSDGSAYYADSVKGRFTISQDTAKNTVYLQMNSLKPEDTAVYYCAADWPPGGQGTLVTVS

SEQ ID NO: 3094 - protein, 111 aa, synthetic construct
EVQLVESGGGSVQAGGSLRLSCTASGFTFDVSDMGWYRQAPGNERELVSTISSDGSAYYVDSVKGRFTISQDNAKNTIYLQMNSLKPEDTAVYYCAADWPPGGQGTLVTVS

SEQ ID NO: 3095 - protein, 111 aa, synthetic construct
EVQLVESGGGSVQAGGSLRLSCTASGFTFDVSDMGWYRQAPGNERELVSTISSDGSAYYVDSVKGRFTISQDNAKNTVYLQMNSLKPEDTAVYYCAADWPPGGQGTLVTVS

SEQ ID NO: 3096 - protein, 111 aa, synthetic construct
EVQLVESGGGSVQAGGSLRLSCTASGFTFDVSDMGWYRQAPGNERELVSTISSDGSTYYADSVKGRFTISQDNAKNTIYLQMNSLKPEDTAMYYCAADWPPGGQGTLVTVS

SEQ ID NO: 3097 - protein, 111 aa, synthetic construct
EVQLVESGGGSVQAGGSLRLSCTASGFTFDVSDMGWYRQAPGNERELVSTISSDGSTYYADSVKGRFTISQDNAKNTIYLQMNSLKPEDTAVYYCAADWPPGGQGTLVTVS

SEQ ID NO: 3098 - protein, 111 aa, synthetic construct
EVQLVESGGGSVQAGGSLRLSCTASGFTFDVSDMGWYRQAPGNERELVSTISSDGSTYYADSVKGRFTISQDNAKNTVYLQMNSLKPEDTAMYYCAADWPPGGQGTLVTVS

SEQ ID NO: 3099 - protein, 111 aa, synthetic construct
EVQLVESGGGSVQAGGSLRLSCTASGFTFDVSDMGWYRQAPGNERELVSTVSSDGSAYYADSVKGRFTISQDNAKNTVYLQMNSLKPEDTAVYYCAADWPPGGQGTLVTVS

SEQ ID NO: 3100 - protein, 111 aa, synthetic construct
EVQLVESGGGSVQAGGSLRLSCTASGFTFDVSDMGWYRQARGNERELVSTISSDGSAYYADSVKGRFTISQDNAKNTVYLQMNSLKPEDTAMYYCAADWPPGGQGTLVTVS

SEQ ID NO: 3101 - protein, 111 aa, synthetic construct
EVQLVESGGGSVQAGGSLRLSCTASGFTFDVSDMGWYRQARGNERELVSTISSDGSAYYADSVKGRFTISQDNAKNTVYLQMNSLKPEDTAVYYCAADWPPGGQGTLVTVS

SEQ ID NO: 3102 - protein, 111 aa, synthetic construct
EVQLVESGGGSVQAGGSLRLSCTASGFTFDVSDMGWYRQARGNERELVSTISSDGSTYYADSVKGRFTISQDNAKNTVYLQMNSLKPEDTAMYYCAADWPPGGQGTLVTVS

SEQ ID NO: 3103 - protein, 111 aa, synthetic construct
EVQLVESGGGSVQAGGSLRLSCTASGFTFDVSDMGWYRQARGNERELVSTISSDGSTYYADSVKGRFTISQDNAKNTVYLQMNSLKPEDTAVYYCAADWPPGGQGTLVTVS

SEQ ID NO: 3104 - protein, 111 aa, synthetic construct
EVQLVESGGGSVQAGGSLRLSRTASGFTFDDSDMGWYRQAPGNECELVSTISSDGSAYYADSVKGRFTISQDNAKNTVYLQMNSLKPEDTAVYYCAADWPPGGQGTLVTVS

SEQ ID NO: 3105 - protein, 111 aa, synthetic construct
EVQLVESGGGSVQAGGSLRLSRTASGFTFDDSDMGWYRQAPGNECELVSTISSDGSTYYADSVKGRFTISQDNAKNTVYLQMNSLKPEDTAVYYCAADWPPGGQGTLVTVS

SEQ ID NO: 3106 - protein, 111 aa, synthetic construct
EVQLVESGGGSVQAGGSLRLSRTASGFTFDDSDMGWYRQAPGNECELVSTVSSDGGTYYADSVKGRFTISQDNAKNTVYLQMNSLKPEDTAVYYCAADWPPGGQGTLVTVS

SEQ ID NO: 3107 - protein, 111 aa, synthetic construct
EVQLVESGGGSVQAGGSLRLSRTASGFTFDDSDMGWYRQAPGNECELVSTVSSDGSTYYADSVKGRFTISQDNAKNTVYLQMNSLKPEDTAVYYCAADWPPGGQGTLVTVS

SEQ ID NO: 3108 - protein, 111 aa, synthetic construct
EVQLVESGGGSVQAGGSLRLSRTASGFTFDDSDMGWYRQAPGNERELVATISSDGSAYYADSVKGRFSISQDNAKNTVYLQMNSLKPEDTAVYYCAADWPPGGQGTLVTVS

SEQ ID NO: 3109 - protein, 111 aa, synthetic construct
EVQLVESGGGSVQAGGSLRLSRTASGFTFDDSDMGWYRQAPGNERELVATISSDGSAYYADSVKGRFTISQDNAKNTVYLQMNSLKPEDTAVYYCAADWPPGGQGTLVTVS

SEQ ID NO: 3110 - protein, 111 aa, synthetic construct
EVQLVESGGGSVQAGGSLRLSRTASGFTFDDSDMGWYRQAPGNERELVATISSDGSTYYADSVKGRFTISQDNAKNTVYLQMNSLKPEDTAVYYCAADWPPGGQGTLVTVS

SEQ ID NO: 3111 - protein, 111 aa, synthetic construct
EVQLVESGGGSVQAGGSLRLSRTASGFTFDDSDMGWYRQAPGNERELVSTISSDGSAYYADSVKGRFSISQDNAKNTVYLQMNSLKPEDTAVYYCAADWPPGGQGTLVTVS

SEQ ID NO: 3112 - protein, 111 aa, synthetic construct
EVQLVESGGGSVQAGGSLRLSRTASGFTFDDSDMGWYRQAPGNERELVSTISSDGSAYYADSVKGRFTISQDNAKNTIYLQMNSLKPEDTAMYYCAADWPPGGQGTLVTVS

SEQ ID NO: 3113 - protein, 111 aa, synthetic construct
EVQLVESGGGSVQAGGSLRLSRTASGFTFDDSDMGWYRQAPGNERELVSTISSDGSAYYADSVKGRFTISQDNAKNTIYLQMNSLKPEDTAVYYCAADWPPGGQGTLVTVS

SEQ ID NO: 3114 - protein, 111 aa, synthetic construct
EVQLVESGGGSVQAGGSLRLSRTASGFTFDDSDMGWYRQAPGNERELVSTISSDGSAYYADSVKGRFTISQDNAKNTVYLQMNSLKPEDTAMYYCAADWPPGGQGTLVTVS

SEQ ID NO: 3115 - protein, 111 aa, synthetic construct
EVQLVESGGGSVQAGGSLRLSRTASGFTFDDSDMGWYRQAPGNERELVSTISSDGSAYYADSVKGRFTISQDNAKNTVYLQMNSLKPEDTAVYYCAADWPPGGPGTLVTVS

SEQ ID NO: 3116 - protein, 111 aa, synthetic construct
EVQLVESGGGSVQAGGSLRLSRTASGFTFDDSDMGWYRQAPGNERELVSTISSDGSAYYADSVKGRFTISQDNAKNTVYLQMNSLKPEDTAVYYCAADWPPGGQGTLVTVS

SEQ ID NO: 3117 - protein, 111 aa, synthetic construct
EVQLVESGGGSVQAGGSLRLSRTASGFTFDDSDMGWYRQAPGNERELVSTISSDGSTYYADSVKGRFSISQDNAKNTVYLQMNSLKPEDTAVYYCAADWPPGGQGTLVTVS

SEQ ID NO: 3118 - protein, 111 aa, synthetic construct
EVQLVESGGGSVQAGGSLRLSRTASGFTFDDSDMGWYRQAPGNERELVSTISSDGSTYYADSVKGRFTISQDNAKNTIYLQMNSLKPEDTAMYYCAADWPPGGQGTLVTVS

SEQ ID NO: 3119 - protein, 111 aa, synthetic construct
EVQLVESGGGSVQAGGSLRLSRTASGFTFDDSDMGWYRQAPGNERELVSTISSDGSTYYADSVKGRFTISQDNAKNTVYLQMNSLKPEDTAMYYCAADWPPGGQGTLVTVS

SEQ ID NO: 3120 - protein, 111 aa, synthetic construct
EVQLVESGGGSVQAGGSLRLSRTASGFTFDDSDMGWYRQAPGNERELVSTISSDGSTYYADSVKGRFTISQDNAKNTVYLQMNSLKPEDTAVYYCAADWPPGGQGTLVTVS

SEQ ID NO: 3121 - protein, 111 aa, synthetic construct
EVQLVESGGGSVQAGGSLRLSRTASGFTFDDSDMGWYRQAPGNERELVSTVSSDGSAYYADSVKGRFTISQDNAKNTVYLQMNSLKPEDTAVYYCAADWPPGGQGTLVTVS

SEQ ID NO: 3122 - protein, 111 aa, synthetic construct
EVQLVESGGGSVQAGGSLRLSRTASGFTFDDSDMGWYRQARGNERELVSTISSDGGTYYADSVKGRFTISQDNAKNTVYLQMNSLKPEDTAVYYCAADWPPGGQGTLVTVS

SEQ ID NO: 3123 - protein, 111 aa, synthetic construct
EVQLVESGGGSVQAGGSLRLSRTASGFTFDDSDMGWYRQARGNERELVSTISSDGSAYYADSVKGRFSISQDNAKNTVYLQMNSLKPEDTAVYYCAADWPPGGQGTLVTVS

SEQ ID NO: 3124 - protein, 111 aa, synthetic construct
EVQLVESGGGSVQAGGSLRLSRTASGFTFDDSDMGWYRQARGNERELVSTISSDGSAYYADSVKGRFTISQDNAKNTVYLQMNSLKPEDTAMYYCAADWPPGGQGTLVTVS

SEQ ID NO: 3125 - protein, 111 aa, synthetic construct
EVQLVESGGGSVQAGGSLRLSRTASGFTFDDSDMGWYRQARGNERELVSTISSDGSAYYADSVKGRFTISQDNAKNTVYLQMNSLKPEDTAVYYCAADWPPGGQGTLVTVS

SEQ ID NO: 3126 - protein, 111 aa, synthetic construct
EVQLVESGGGSVQAGGSLRLSRTASGFTFDDSDMGWYRQARGNERELVSTISSDGSTYYADSVKGRFSISQDNAKNTVYLQMNSLKPEDTAVYYCAADWPPGGQGTLVTVS

SEQ ID NO: 3127 - protein, 111 aa, synthetic construct
EVQLVESGGGSVQAGGSLRLSRTASGFTFDDSDMGWYRQARGNERELVSTISSDGSTYYADSVKGRFTISQDNAKNTIYLQMNSLKPEDTAVYYCAADWPPGGQGTLVTVS

SEQ ID NO: 3128 - protein, 111 aa, synthetic construct
EVQLVESGGGSVQAGGSLRLSRTASGFTFDDSDMGWYRQARGNERELVSTISSDGSTYYADSVKGRFTISQDNAKNTVYLQMNSLKPEDTAMYYCAADWPPGGQGTLVTVS

SEQ ID NO: 3129 - protein, 111 aa, synthetic construct
EVQLVESGGGSVQAGGSLRLSRTASGFTFDDSDMGWYRQARGNERELVSTISSDGSTYYVDSVKGRFTISQDNAKNTVYLQMNSLKPEDTAVYYCAADWPPGGQGTLVTVS

SEQ ID NO: 3130 - protein, 111 aa, synthetic construct
EVQLVESGGGSVQAGGSLRLSRTASGFTFDVSDMGWYRQAPGNECELVSTISSDGSAYYADSVKGRFTISQDNAKNTVYLQMNSLKPEDTAVYYCAADWPPGGQGTLVTVS

SEQ ID NO: 3131 - protein, 111 aa, synthetic construct
EVQLVESGGGSVQAGGSLRLSRTASGFTFDVSDMGWYRQAPGNERELVSTISSDGSAYYADSVKGRFSISQDNAKNTVYLQMNSLKPEDTAVYYCAADWPPGGQGTLVTVS

SEQ ID NO: 3132 - protein, 111 aa, synthetic construct
EVQLVESGGGSVQAGGSLRLSRTASGFTFDVSDMGWYRQAPGNERELVSTISSDGSAYYADSVKGRFTISQDNAKNTIYLQMNSLKPEDTAMYYCAADWPPGGQGTLVTVS

SEQ ID NO: 3133 - protein, 111 aa, synthetic construct
EVQLVESGGGSVQAGGSLRLSRTASGFTFDVSDMGWYRQAPGNERELVSTISSDGSAYYADSVKGRFTISQDNAKNTIYLQMNSLKPEDTAVYYCAADWPPGGQGTLVTVS

SEQ ID NO: 3134 - protein, 111 aa, synthetic construct
EVQLVESGGGSVQAGGSLRLSRTASGFTFDVSDMGWYRQAPGNERELVSTISSDGSAYYADSVKGRFTISQDNAKNTVYLQMNSLKPEDTAMYYCAADWPPGGQGTLVTVS

SEQ ID NO: 3135 - protein, 111 aa, synthetic construct
EVQLVESGGGSVQAGGSLRLSRTASGFTFDVSDMGWYRQAPGNERELVSTISSDGSAYYADSVKGRFTISQDNAKNTVYLQMNSLKPEDTAVYYCAADWPPGGQGTLVTVS

SEQ ID NO: 3136 - protein, 111 aa, synthetic construct
EVQLVESGGGSVQAGGSLRLSRTASGFTFDVSDMGWYRQAPGNERELVSTISSDGSTYYADSVKGRFTISQDNAKNTVYLQMNSLKPEDTAVYYCAADWPPGGQGTLVTVS

SEQ ID NO: 3137 - protein, 111 aa, synthetic construct
EVQLVESGGGSVQAGGSLRLSRTASGFTFDVSDMGWYRQARGNERELVSTISSDGSAYYADSVKGRFTISQDNAKNTVYLQMNSLKPEDTAVYYCAADWPPGGQGTLVTVS

SEQ ID NO: 3138 - protein, 111 aa, synthetic construct
EVQLVESGGGSVQAGGSLRLSRTASGFTFDVSDMGWYRQARGNERELVSTISSDGSTYYADSVKGRFTISQDNAKNTVYLQMNSLKPEDTAVYYCAADWPPGGQGTLVTVS

SEQ ID NO: 3139 - protein, 111 aa, synthetic construct
EVQVVESGGGSVEAGGSLRLSCTASGFTFDDSDMGWYRQAPGNECELVSTISSDGSAYYADSVKGRFTISQDNAKNTVYLQMNSLKPEDTAVYYCAADWPPGGQGTLVTVS

SEQ ID NO: 3140 - protein, 111 aa, synthetic construct
EVQVVESGGGSVEAGGSLRLSCTASGFTFDDSDMGWYRQAPGNECELVSTVSSDGSAYYADSVKGRFTISQDNAKNTVYLQMNSLKPEDTAVYYCAADWPPGGQGTLVTVS

SEQ ID NO: 3141 - protein, 111 aa, synthetic construct
EVQVVESGGGSVEAGGSLRLSCTASGFTFDDSDMGWYRQAPGNERELVATISSDGSAYYADSVKGRFTISQDNAKNTVYLQMNSLKPEDTAVYYCAADWPPGGQGTLVTVS

SEQ ID NO: 3142 - protein, 111 aa, synthetic construct
EVQVVESGGGSVEAGGSLRLSCTASGFTFDDSDMGWYRQAPGNERELVSTISSDGSAYYADSVKGRFSISQDNAKNTVYLQMNSLKPEDTAVYYCAADWPPGGQGTLVTVS

SEQ ID NO: 3143 - protein, 111 aa, synthetic construct
EVQVVESGGGSVEAGGSLRLSCTASGFTFDDSDMGWYRQAPGNERELVSTISSDGSAYYADSVKGRFTISQDNAKNTIYLQMNSLKPEDTAVYYCAADWPPGGQGTLVTVS

SEQ ID NO: 3144 - protein, 111 aa, synthetic construct
EVQVVESGGGSVEAGGSLRLSCTASGFTFDDSDMGWYRQAPGNERELVSTISSDGSAYYADSVKGRFTISQDNAKNTVYLQMNSLKPEDTAMYYCAADWPPGGQGTLVTVS

SEQ ID NO: 3145 - protein, 111 aa, synthetic construct
EVQVVESGGGSVEAGGSLRLSCTASGFTFDDSDMGWYRQAPGNERELVSTISSDGSAYYADSVKGRFTISQDNAKNTVYLQMNSLKPEDTAVYYCAADWPPGGQGTLVTVS

SEQ ID NO: 3146 - protein, 111 aa, synthetic construct
EVQVVESGGGSVEAGGSLRLSCTASGFTFDDSDMGWYRQARGNERELVSTISSDGSAYYADSVKGRFTISQDNAKNTVYLQMNSLKPEDTAVYYCAADWPPGGQGTLVTVS

SEQ ID NO: 3147 - protein, 111 aa, synthetic construct
EVQVVESGGGSVEAGGSLRLSCTASGFTFDDSDMGWYRQARGNERELVSTISSDGSTYYADSVKGRFTISQDNAKNTIYLQMNSLKPEDTAVYYCAADWPPGGQGTLVTVS

SEQ ID NO: 3148 - protein, 111 aa, synthetic construct
EVQVVESGGGSVEAGGSLRLSCTASGFTFDDSDMGWYRQARGNERELVSTISSDGSTYYADSVKGRFTISQDNAKNTVYLQMNSLKPEDTAVYYCAADWPPGGQGTLVTVS

SEQ ID NO: 3149 - protein, 111 aa, synthetic construct
EVQVVESGGGSVEAGGSLRLSCTASGFTFDVSDMGWYRQAPGNERELVSTISSDGSAYYADSVKGRFSISQDNAKNTVYLQMNSLKPEDTAVYYCAADWPPGGQGTLVTVS

SEQ ID NO: 3150 - protein, 111 aa, synthetic construct
EVQVVESGGGSVEAGGSLRLSCTASGFTFDVSDMGWYRQAPGNERELVSTISSDGSAYYADSVKGRFTISQDNAKNTIYLQMNSLKPEDTAVYYCAADWPPGGQGTLVTVS

SEQ ID NO: 3151 - protein, 111 aa, synthetic construct
EVQVVESGGGSVEAGGSLRLSCTASGFTFDVSDMGWYRQAPGNERELVSTISSDGSAYYADSVKGRFTISQDNAKNTVYLQMNSLKPEDTAVYYCAADWPPGGQGTLVTVS

SEQ ID NO: 3152 - protein, 111 aa, synthetic construct
EVQVVESGGGSVEAGGSLRLSCTASGFTFDVSDMGWYRQAPGNERELVSTISSDGSTYYADSVKGRFTISQDNAKNTVYLQMNSLKPEDTAVYYCAADWPPGGQGTLVTVS

SEQ ID NO: 3153 - protein, 111 aa, synthetic construct
EVQVVESGGGSVEAGGSLRLSRTASGFTFDDSDMGWYRQAPGNERELVSTISSDGSAYYADSVKGRFTISQDNAKNTVYLQMNSLKPEDTAVYYCAADWPPGGQGTLVTVS

SEQ ID NO: 3154 - protein, 111 aa, synthetic construct
EVQVVESGGGSVEAGGSLRLSRTASGFTFDVSDMGWYRQAPGNERELVSTISSDGSAYYADSVKGRFTISQDNAKNTVYLQMNSLKPEDTAVYYCAADWPPGGQGTLVTVS

SEQ ID NO: 3155 - protein, 111 aa, synthetic construct
EVQVVESGGGSVQAGGSLRLSCTASGFTFDDSDMGWYRQAPGNECELVSTISSDGSAYYADSVKGRFTISQDNAKNTVYLQMNSLKPEDTAVYYCAADWPPGGQGTLVTVS

SEQ ID NO: 3156 - protein, 111 aa, synthetic construct
EVQVVESGGGSVQAGGSLRLSCTASGFTFDDSDMGWYRQAPGNECELVSTISSDGSTYYADSVKGRFTISQDNAKNTVYLQMNSLKPEDTAVYYCAADWPPGGQGTLVTVS

SEQ ID NO: 3157 - protein, 111 aa, synthetic construct
EVQVVESGGGSVQAGGSLRLSCTASGFTFDDSDMGWYRQAPGNECELVSTVSSDGSAYYADSVKGRFTISQDNAKNTVYLQMNSLKPEDTAVYYCAADWPPGGQGTLVTVS

SEQ ID NO: 3158 - protein, 111 aa, synthetic construct
EVQVVESGGGSVQAGGSLRLSCTASGFTFDDSDMGWYRQAPGNERELVATISSDGSAYYADSVKGRFTISQDNAKNTVYLQMNSLKPEDTAVYYCAADWPPGGQGTLVTVS

SEQ ID NO: 3159 - protein, 111 aa, synthetic construct
EVQVVESGGGSVQAGGSLRLSCTASGFTFDDSDMGWYRQAPGNERELVATISSDGSTYYADSVKGRFTISQDNAKNTVYLQMNSLKPEDTAVYYCAADWPPGGQGTLVTVS

SEQ ID NO: 3160 - protein, 111 aa, synthetic construct
EVQVVESGGGSVQAGGSLRLSCTASGFTFDDSDMGWYRQAPGNERELVSTIFSDGSAYYADSVKGRFTISQDNAKNTVYLQMNSLKPEDTAVYYCAADWPPGGQGTLVTVS

SEQ ID NO: 3161 - protein, 111 aa, synthetic construct
EVQVVESGGGSVQAGGSLRLSCTASGFTFDDSDMGWYRQAPGNERELVSTISSDGSAYYADSVKGRFSISQDNAKNTVYLQMNSLKPEDTAVYYCAADWPPGGQGTLVTVS

SEQ ID NO: 3162 - protein, 111 aa, synthetic construct
EVQVVESGGGSVQAGGSLRLSCTASGFTFDDSDMGWYRQAPGNERELVSTISSDGSAYYADSVKGRFTISQDNAKNTIYLQMNSLKPEDTAMYYCAADWPPGGQGTLVTVS

SEQ ID NO: 3163 - protein, 111 aa, synthetic construct
EVQVVESGGGSVQAGGSLRLSCTASGFTFDDSDMGWYRQAPGNERELVSTISSDGSAYYADSVKGRFTISQDNAKNTIYLQMNSLKPEDTAVYYCAADWPPGGQGTLVTVS

SEQ ID NO: 3164 - protein, 111 aa, synthetic construct
EVQVVESGGGSVQAGGSLRLSCTASGFTFDDSDMGWYRQAPGNERELVSTISSDGSAYYADSVKGRFTISQDNAKNTVYLQMNSLKPEDTAMYYCAADWPPGGQGTLVTVS

SEQ ID NO: 3165 - protein, 111 aa, synthetic construct
EVQVVESGGGSVQAGGSLRLSCTASGFTFDDSDMGWYRQAPGNERELVSTISSDGSAYYADSVKGRFTISQDNAKNTVYLQMNSLKPEDTAVYYCAADWPPGGPGTLVTVS

SEQ ID NO: 3166 - protein, 111 aa, synthetic construct
EVQVVESGGGSVQAGGSLRLSCTASGFTFDDSDMGWYRQAPGNERELVSTISSDGSAYYADSVKGRFTISQDNAKNTVYLQMNSLKPEDTAVYYCAADWPPGGQGTLVTVS

SEQ ID NO: 3167 - protein, 111 aa, synthetic construct
EVQVVESGGGSVQAGGSLRLSCTASGFTFDDSDMGWYRQAPGNERELVSTISSDGSTYYADSVKGRFSISQDNAKNTVYLQMNSLKPEDTAVYYCAADWPPGGQGTLVTVS

SEQ ID NO: 3168 - protein, 111 aa, synthetic construct
EVQVVESGGGSVQAGGSLRLSCTASGFTFDDSDMGWYRQAPGNERELVSTISSDGSTYYADSVKGRFTISQDNAKNTIYLQMNSLKPEDTAMYYCAADWPPGGQGTLVTVS

SEQ ID NO: 3169 - protein, 111 aa, synthetic construct
EVQVVESGGGSVQAGGSLRLSCTASGFTFDDSDMGWYRQAPGNERELVSTISSDGSTYYADSVKGRFTISQDNAKNTIYLQMNSLKPEDTAVYYCAADWPPGGQGTLVTVS

SEQ ID NO: 3170 - protein, 111 aa, synthetic construct
EVQVVESGGGSVQAGGSLRLSCTASGFTFDDSDMGWYRQAPGNERELVSTISSDGSTYYADSVKGRFTISQDNAKNTVYLQMNSLKPEDTAVYYCAADWPPGGQGTLVTVS

SEQ ID NO: 3171 - protein, 111 aa, synthetic construct
EVQVVESGGGSVQAGGSLRLSCTASGFTFDDSDMGWYRQARGNERELVSTISSDGGTYYADSVKGRFTISQDNAKNTVYLQMNSLKPEDTAVYYCAADWPPGGQGTLVTVS

SEQ ID NO: 3172 - protein, 111 aa, synthetic construct
EVQVVESGGGSVQAGGSLRLSCTASGFTFDDSDMGWYRQARGNERELVSTISSDGSAYYADSVKGRFTISQDNAKNTIYLQMNSLKPEDTAVYYCAADWPPGGQGTLVTVS

SEQ ID NO: 3173 - protein, 111 aa, synthetic construct
EVQVVESGGGSVQAGGSLRLSCTASGFTFDDSDMGWYRQARGNERELVSTISSDGSAYYADSVKGRFTISQDNAKNTVYLQMNSLKPEDTAVYYCAADWPPGGQGTLVTVS

SEQ ID NO: 3174 - protein, 111 aa, synthetic construct
EVQVVESGGGSVQAGGSLRLSCTASGFTFDDSDMGWYRQARGNERELVSTISSDGSAYYVDSVKGRFTISQDNAKNTVYLQMNSLKPEDTAVYYCAADWPPGGQGTLVTVS

SEQ ID NO: 3175 - protein, 111 aa, synthetic construct
EVQVVESGGGSVQAGGSLRLSCTASGFTFDDSDMGWYRQARGNERELVSTISSDGSTYYADSVKGRFSISQDNAKNTVYLQMNSLKPEDTAVYYCAADWPPGGQGTLVTVS

SEQ ID NO: 3176 - protein, 111 aa, synthetic construct
EVQVVESGGGSVQAGGSLRLSCTASGFTFDDSDMGWYRQARGNERELVSTISSDGSTYYADSVKGRFTISQDNAKNTIYLQMNSLKPEDTAVYYCAADWPPGGQGTLVTVS

SEQ ID NO: 3177 - protein, 111 aa, synthetic construct
EVQVVESGGGSVQAGGSLRLSCTASGFTFDDSDMGWYRQARGNERELVSTISSDGSTYYADSVKGRFTISQDNAKNTVYLQMNSLKPEDTAMYYCAADWPPGGQGTLVTVS

SEQ ID NO: 3178 - protein, 111 aa, synthetic construct
EVQVVESGGGSVQAGGSLRLSCTASGFTFDDSDMGWYRQARGNERELVSTISSDGSTYYADSVKGRFTISQDNAKNTVYLQMNSLKPEDTAVYYCAADWPPGGQGTLVTVS

SEQ ID NO: 3179 - protein, 111 aa, synthetic construct
EVQVVESGGGSVQAGGSLRLSCTASGFTFDDSDMGWYRQARGNERELVSTISSDGSTYYVDSVKGRFTISQDNAKNTVYLQMNSLKPEDTAVYYCAADWPPGGQGTLVTVS

SEQ ID NO: 3180 - protein, 111 aa, synthetic construct
EVQVVESGGGSVQAGGSLRLSCTASGFTFDVSDMGWYRQAPGNECELVSTISSDGSAYYADSVKGRFTISQDNAKNTVYLQMNSLKPEDTAVYYCAADWPPGGQGTLVTVS

SEQ ID NO: 3181 - protein, 111 aa, synthetic construct
EVQVVESGGGSVQAGGSLRLSCTASGFTFDVSDMGWYRQAPGNERELVATISSDGSAYYADSVKGRFTISQDNAKNTVYLQMNSLKPEDTAVYYCAADWPPGGQGTLVTVS

SEQ ID NO: 3182 - protein, 111 aa, synthetic construct
EVQVVESGGGSVQAGGSLRLSCTASGFTFDVSDMGWYRQAPGNERELVATISSDGSTYYADSVKGRFTISQDNAKNTVYLQMNSLKPEDTAVYYCAADWPPGGQGTLVTVS

SEQ ID NO: 3183 - protein, 111 aa, synthetic construct
EVQVVESGGGSVQAGGSLRLSCTASGFTFDVSDMGWYRQAPGNERELVSTIFSDGSAYYADSVKGRFTISQDNAKNTVYLQMNSLKPEDTAVYYCAADWPPGGQGTLVTVS

SEQ ID NO: 3184 - protein, 111 aa, synthetic construct
EVQVVESGGGSVQAGGSLRLSCTASGFTFDVSDMGWYRQAPGNERELVSTISSDGSAYYADSVKGRFSISQDNAKNTVYLQMNSLKPEDTAVYYCAADWPPGGQGTLVTVS

SEQ ID NO: 3185 - protein, 111 aa, synthetic construct
EVQVVESGGGSVQAGGSLRLSCTASGFTFDVSDMGWYRQAPGNERELVSTISSDGSAYYADSVKGRFTISQDNAKNTIYLQMNSLKPEDTAMYYCAADWPPGGQGTLVTVS

SEQ ID NO: 3186 - protein, 111 aa, synthetic construct
EVQVVESGGGSVQAGGSLRLSCTASGFTFDVSDMGWYRQAPGNERELVSTISSDGSAYYADSVKGRFTISQDNAKNTIYLQMNSLKPEDTAVYYCAADWPPGGQGTLVTVS

SEQ ID NO: 3187 - protein, 111 aa, synthetic construct
EVQVVESGGGSVQAGGSLRLSCTASGFTFDVSDMGWYRQAPGNERELVSTISSDGSAYYADSVKGRFTISQDNAKNTVYLQMNSLKPEDTAMYYCAADWPPGGQGTLVTVS

SEQ ID NO: 3188 - protein, 111 aa, synthetic construct
EVQVVESGGGSVQAGGSLRLSCTASGFTFDVSDMGWYRQAPGNERELVSTISSDGSAYYADSVKGRFTISQDNAKNTVYLQMNSLKPEDTAVYYCAADWPPGGQGTLVTVS

SEQ ID NO: 3189 - protein, 111 aa, synthetic construct
EVQVVESGGGSVQAGGSLRLSCTASGFTFDVSDMGWYRQAPGNERELVSTISSDGSAYYVDSVKGRFTISQDNAKNTVYLQMNSLKPEDTAVYYCAADWPPGGQGTLVTVS

SEQ ID NO: 3190 - protein, 111 aa, synthetic construct
EVQVVESGGGSVQAGGSLRLSCTASGFTFDVSDMGWYRQAPGNERELVSTISSDGSTYYADSVKGRFSISQDNAKNTVYLQMNSLKPEDTAVYYCAADWPPGGQGTLVTVS

SEQ ID NO: 3191 - protein, 111 aa, synthetic construct
EVQVVESGGGSVQAGGSLRLSCTASGFTFDVSDMGWYRQAPGNERELVSTISSDGSTYYADSVKGRFTISQDNAKNTIYLQMNSLKPEDTAVYYCAADWPPGGQGTLVTVS

SEQ ID NO: 3192 - protein, 111 aa, synthetic construct
EVQVVESGGGSVQAGGSLRLSCTASGFTFDVSDMGWYRQAPGNERELVSTISSDGSTYYADSVKGRFTISQDNAKNTVYLQMNSLKPEDTAVYYCAADWPPGGQGTLVTVS

SEQ ID NO: 3193 - protein, 111 aa, synthetic construct
EVQVVESGGGSVQAGGSLRLSCTASGFTFDVSDMGWYRQARGNERELVSTISSDGSAYYADSVKGRFTISQDNAKNTVYLQMNSLKPEDTAVYYCAADWPPGGQGTLVTVS

SEQ ID NO: 3194 - protein, 111 aa, synthetic construct
EVQVVESGGGSVQAGGSLRLSCTASGFTFDVSDMGWYRQARGNERELVSTISSDGSTYYADSVKGRFTISQDNAKNTVYLQMNSLKPEDTAVYYCAADWPPGGQGTLVTVS

SEQ ID NO: 3195 - protein, 111 aa, synthetic construct
EVQVVESGGGSVQAGGSLRLSRTASGFTFDDSDMGWYRQAPGNECELVSTISSDGSAYYADSVKGRFTISQDNAKNTVYLQMNSLKPEDTAVYYCAADWPPGGQGTLVTVS

SEQ ID NO: 3196 - protein, 111 aa, synthetic construct
EVQVVESGGGSVQAGGSLRLSRTASGFTFDDSDMGWYRQAPGNERELVATISSDGSAYYADSVKGRFTISQDNAKNTVYLQMNSLKPEDTAVYYCAADWPPGGQGTLVTVS

SEQ ID NO: 3197 - protein, 111 aa, synthetic construct
EVQVVESGGGSVQAGGSLRLSRTASGFTFDDSDMGWYRQAPGNERELVATISSDGSTYYADSVKGRFTISQDNAKNTVYLQMNSLKPEDTAVYYCAADWPPGGQGTLVTVS

SEQ ID NO: 3198 - protein, 111 aa, synthetic construct
EVQVVESGGGSVQAGGSLRLSRTASGFTFDDSDMGWYRQAPGNERELVSTISSDGSAYYADSVKGRFSISQDNAKNTVYLQMNSLKPEDTAVYYCAADWPPGGQGTLVTVS

SEQ ID NO: 3199 - protein, 111 aa, synthetic construct
EVQVVESGGGSVQAGGSLRLSRTASGFTFDDSDMGWYRQAPGNERELVSTISSDGSAYYADSVKGRFTISQDNAKNTIYLQMNSLKPEDTAVYYCAADWPPGGQGTLVTVS

SEQ ID NO: 3200 - protein, 111 aa, synthetic construct
EVQVVESGGGSVQAGGSLRLSRTASGFTFDDSDMGWYRQAPGNERELVSTISSDGSAYYADSVKGRFTISQDNAKNTVYLQMNSLKPEDTAMYYCAADWPPGGQGTLVTVS

SEQ ID NO: 3201 - protein, 111 aa, synthetic construct
EVQVVESGGGSVQAGGSLRLSRTASGFTFDDSDMGWYRQAPGNERELVSTISSDGSAYYADSVKGRFTISQDNAKNTVYLQMNSLKPEDTAVYYCAADWPPGGQGTLVTVS

SEQ ID NO: 3202 - protein, 111 aa, synthetic construct
EVQVVESGGGSVQAGGSLRLSRTASGFTFDDSDMGWYRQAPGNERELVSTISSDGSTYYADSVKGRFTISQDNAKNTIYLQMNSLKPEDTAVYYCAADWPPGGQGTLVTVS

SEQ ID NO: 3203 - protein, 111 aa, synthetic construct
EVQVVESGGGSVQAGGSLRLSRTASGFTFDDSDMGWYRQAPGNERELVSTISSDGSTYYADSVKGRFTISQDNAKNTVYLQMNSLKPEDTAVYYCAADWPPGGQGTLVTVS

SEQ ID NO: 3204 - protein, 111 aa, synthetic construct
EVQVVESGGGSVQAGGSLRLSRTASGFTFDDSDMGWYRQARGNERELVSTISSDGSAYYADSVKGRFTISQDNAKNTVYLQMNSLKPEDTAVYYCAADWPPGGQGTLVTVS

SEQ ID NO: 3205 - protein, 111 aa, synthetic construct
EVQVVESGGGSVQAGGSLRLSRTASGFTFDDSDMGWYRQARGNERELVSTISSDGSTYYADSVKGRFTISQDNAKNTIYLQMNSLKPEDTAVYYCAADWPPGGQGTLVTVS

SEQ ID NO: 3206 - protein, 111 aa, synthetic construct
EVQVVESGGGSVQAGGSLRLSRTASGFTFDDSDMGWYRQARGNERELVSTISSDGSTYYADSVKGRFTISQDNAKNTVYLQMNSLKPEDTAVYYCAADWPPGGQGTLVTVS

SEQ ID NO: 3207 - protein, 111 aa, synthetic construct
EVQVVESGGGSVQAGGSLRLSRTASGFTFDVSDMGWYRQAPGNERELVSTISSDGSAYYADSVKGRFSISQDNAKNTVYLQMNSLKPEDTAVYYCAADWPPGGQGTLVTVS

SEQ ID NO: 3208 - protein, 111 aa, synthetic construct
EVQVVESGGGSVQAGGSLRLSRTASGFTFDVSDMGWYRQAPGNERELVSTISSDGSAYYADSVKGRFTISQDNAKNTVYLQMNSLKPEDTAVYYCAADWPPGGQGTLVTVS

SEQ ID NO: 3209 - protein, 111 aa, synthetic construct
EVQVVESGGGSVQAGGSLRLSRTASGFTFDVSDMGWYRQAPGNERELVSTISSDGSTYYADSVKGRFTISQDNAKNTVYLQMNSLKPEDTAVYYCAADWPPGGQGTLVTVS

SEQ ID NO: 3210 - protein, 110 aa, synthetic construct
VQLVESGGGSVEAGGSLRLSCTASGFTFDVSDMGWYRQAPGNERELVSTISSDGSAYYADSVKGRFTISQDNAKNTVYLQMNSLKPEDTAVYYCAADWPPGGQGTLVTVS

SEQ ID NO: 3211 - protein, 110 aa, synthetic construct
VQLVESGGGSVQAGGSLRLSCTASGFTFDDSDMGWYRQAPGNERELVSTISSDGSAYYADSVKGRFTISQDNAKNTVYLQMNSLKPEDTAVYYCAADWPPGGQGTLVTVS

SEQ ID NO: 3212 - protein, 110 aa, synthetic construct
VQLVESGGGSVQAGGSLRLSCTASGFTFDDSDMGWYRQARGNERELVSTISSDGSTYYADSVKGRFTISQDNAKNTVYLQMNSLKPEDTAVYYCAADWPPGGQGTLVTVS

SEQ ID NO: 3213 - protein, 110 aa, synthetic construct
VQLVESGGGSVQAGGSLRLSCTASGFTFDVSDMGWYRQAPGNERELVSTISSDGSAYYADSVKGRFTISQDNAKNTVYLQMNSLKPEDTAVYYCAADWPPGGQGTLVTVS

SEQ ID NO: 3214 - protein, 8 aa, synthetic construct
TISSDGSA

SEQ ID NO: 3215 - protein, 8 aa, synthetic construct
TISSDGST

SEQ ID NO: 3216 - protein, 8 aa, synthetic construct
TVSSDGSA

SEQ ID NO: 3217 - protein, 7 aa, synthetic construct
VSSDGSA

SEQ ID NO: 3218 - protein, 7 aa, synthetic construct
VSSDGRT

SEQ ID NO: 3219 - protein, 7 aa, synthetic construct
IFSDGSA

SEQ ID NO: 3220 - protein, 117 aa, synthetic construct
LHLVESGGGLVQPGGSLRLSCAASGFTLDSYAIGWFRQAPGKEREGVSYISSSGGSTNYADSVKGRFTISRDNAKNTVYLQMNSLKPEDTGVYSCAAAGGYGNSSRYWGQGTSVTVS

SEQ ID NO: 3221 - protein, 117 aa, synthetic construct
LQLGESGGGLVQPGGSLRLSCAASGFTLDYYAIGWFRQAPGKEREGVSYISSSGGSTNYADSVKGRFTVSRDNAKNTVYLQMNSLKPEDTGVYSCAAAGGYGNSSRYWGQGTSVTVS

SEQ ID NO: 3222 - protein, 117 aa, synthetic construct
LQLVESGGGLVQPGGFLRLSCAASGFTLDYYAIGWFRQAPGKEREGVSYISSSGGSTNYADSVKGRFTVSRDNAKNTVYLQMNSLKPEDTGVYSCAAAGGYGNSSRYWGQGTSVTVS

SEQ ID NO: 3223 - protein, 117 aa, synthetic construct
LQLVESGGGLVQPGGSLRLSCAASGFTLDSYAIGWFRQAPGKEREGVAYISSSGGSTNYADSVKGRFTISRNNAKNTVYLQMHSLKPEDTAVYSCAAAGGYGNSSRYWGQGTSVTVS

SEQ ID NO: 3224 - protein, 117 aa, synthetic construct
LQLVESGGGLVQPGGSLRLSCAASGFTLDSYAIGWFRQAPGKEREGVSCISSSGGSTNYADSVKGRFTISRDNAKNTVYLQMNSLKPEDTGVYSCAAAGGYGNSSRYWGQGTSVTVS

SEQ ID NO: 3225 - protein, 117 aa, synthetic construct
LQLVESGGGLVQPGGSLRLSCAASGFTLDSYAIGWFRQAPGKEREGVSYISSSGGSTNYADGVKGRFTISRDNAKNTVYLQMNSLKPEDTGVYSCAAAGGYGNSSRYWGQGTSVTVS

SEQ ID NO: 3226 - protein, 117 aa, synthetic construct
LQLVESGGGLVQPGGSLRLSCAASGFTLDSYAIGWFRQAPGKEREGVSYISSSGGSTNYADSVKGRFSISRDNAKNTVYLQMNSLKPEDTGVYSCAAAGGYGNSSRYWGQGTSVTVS

SEQ ID NO: 3227 - protein, 117 aa, synthetic construct
LQLVESGGGLVQPGGSLRLSCAASGFTLDSYAIGWFRQAPGKEREGVSYISSSGGSTNYADSVKGRFTISRDNAKNTVFLQMNSLKPEDTGVYSCAAAGGYGNSSRYWGQGTSVTVS

SEQ ID NO: 3228 - protein, 117 aa, synthetic construct
LQLVESGGGLVQPGGSLRLSCAASGFTLDSYAIGWFRQAPGKEREGVSYISSSGGSTNYADSVKGRFTISRDNAKNTVSLQMNSLKPEDTGVYSCAAAGGYGNSSRYWGQGTSVTVS

SEQ ID NO: 3229 - protein, 117 aa, synthetic construct
LQLVESGGGLVQPGGSLRLSCAASGFTLDSYAIGWFRQAPGKEREGVSYISSSGGSTNYADSVKGRFTISRDNAKNTVYLQMHNLKPEDTAVYSCAAAGGYGNSSRYWGQGTSVTVS

SEQ ID NO: 3230 - protein, 117 aa, synthetic construct
LQLVESGGGLVQPGGSLRLSCAASGFTLDSYAIGWFRQAPGKEREGVSYISSSGGSTNYADSVKGRFTISRDNAKNTVYLQMHNLKPEDTGVYSCAAAGGYGNSSRYWGQGTSVTVS

SEQ ID NO: 3231 - protein, 117 aa, synthetic construct
LQLVESGGGLVQPGGSLRLSCAASGFTLDSYAIGWFRQAPGKEREGVSYISSSGGSTNYADSVKGRFTISRDNAKNTVYLQMHSLKPEDTAVYSCAAAGGYGNSSRYWGQGTSVTVS

SEQ ID NO: 3232 - protein, 117 aa, synthetic construct
LQLVESGGGLVQPGGSLRLSCAASGFTLDSYAIGWFRQAPGKEREGVSYISSSGGSTNYADSVKGRFTISRDNAKNTVYLQMHSLKPEDTGVYSCAAAGGYGNSSRYWGQGTSVTVS

SEQ ID NO: 3233 - protein, 117 aa, synthetic construct
LQLVESGGGLVQPGGSLRLSCAASGFTLDSYAIGWFRQAPGKEREGVSYISSSGGSTNYADSVKGRFTISRDNAKNTVYLQMNSLKPEDTAVYSCAAAGGYGNSSRHWGQGTSVTVS

SEQ ID NO: 3234 - protein, 117 aa, synthetic construct
LQLVESGGGLVQPGGSLRLSCAASGFTLDSYAIGWFRQAPGKEREGVSYISSSGGSTNYADSVKGRFTISRDNAKNTVYLQMNSLKPEDTAVYSCAAAGGYGNSSRYWGQGTSVTVS

SEQ ID NO: 3235 - protein, 117 aa, synthetic construct
LQLVESGGGLVQPGGSLRLSCAASGFTLDSYAIGWFRQAPGKEREGVSYISSSGGSTNYADSVKGRFTISRDNAKNTVYLQMNSLKPEDTAVYSCAAAGGYRNSSRYWGQGTSVTVS

SEQ ID NO: 3236 - protein, 117 aa, synthetic construct
LQLVESGGGLVQPGGSLRLSCAASGFTLDSYAIGWFRQAPGKEREGVSYISSSGGSTNYADSVKGRFTISRDNAKNTVYLQMNSLKPEDTCVYSCAAAGGYGNSSRYWGQGTSVTVS

SEQ ID NO: 3237 - protein, 117 aa, synthetic construct
LQLVESGGGLVQPGGSLRLSCAASGFTLDSYAIGWFRQAPGKEREGVSYISSSGGSTNYADSVKGRFTISRDNAKNTVYLQMNSLKPEDTGVYSCAAAGGYGNFSRYWGQGTSVTVS

SEQ ID NO: 3238 - protein, 117 aa, synthetic construct
LQLVESGGGLVQPGGSLRLSCAASGFTLDSYAIGWFRQAPGKEREGVSYISSSGGSTNYADSVKGRFTISRDNAKNTVYLQMNSLKPEDTGVYSCAAAGGYGNSPRYWGQGTSVTVS

SEQ ID NO: 3239 - protein, 117 aa, synthetic construct
LQLVESGGGLVQPGGSLRLSCAASGFTLDSYAIGWFRQAPGKEREGVSYISSSGGSTNYADSVKGRFTISRDNAKNTVYLQMNSLKPEDTGVYSCAAAGGYGNSSRCWGQGTSVTVS

SEQ ID NO: 3240 - protein, 117 aa, synthetic construct
LQLVESGGGLVQPGGSLRLSCAASGFTLDSYAIGWFRQAPGKEREGVSYISSSGGSTNYADSVKGRFTISRDNAKNTVYLQMNSLKPEDTGVYSCAAAGGYGNSSRHWGQGTSVTVS

SEQ ID NO: 3241 - protein, 117 aa, synthetic construct
LQLVESGGGLVQPGGSLRLSCAASGFTLDSYAIGWFRQAPGKEREGVSYISSSGGSTNYADSVKGRFTISRDNAKNTVYLQMNSLKPEDTGVYSCAAAGGYGNSSRYWGPGTSVTVS

SEQ ID NO: 3242 - protein, 117 aa, synthetic construct
LQLVESGGGLVQPGGSLRLSCAASGFTLDSYAIGWFRQAPGKEREGVSYISSSGGSTNYADSVKGRFTISRDNAKNTVYLQMNSLKPEDTGVYSCAAAGGYGNSSRYWGQGASVTVS

SEQ ID NO: 3243 - protein, 117 aa, synthetic construct
LQLVESGGGLVQPGGSLRLSCAASGFTLDSYAIGWFRQAPGKEREGVSYISSSGGSTNYADSVKGRFTISRDNAKNTVYLQMNSLKPEDTGVYSCAAAGGYGNSSRYWGQGTSVTVS

SEQ ID NO: 3244 - protein, 117 aa, synthetic construct
LQLVESGGGLVQPGGSLRLSCAASGFTLDSYAIGWFRQAPGKEREGVSYISSSGGSTNYADSVKGRFTISRDNAKNTVYLQMNSLKPEDTGVYSCAAAGGYGNSSRYWGQGTTVTVS

SEQ ID NO: 3245 - protein, 117 aa, synthetic construct
LQLVESGGGLVQPGGSLRLSCAASGFTLDSYAIGWFRQAPGKEREGVSYISSSGGSTNYADSVKGRFTISRDNAKNTVYLQMNSLKPEDTGVYSCAAAGGYRNSSRYWGQGTSVTVS

SEQ ID NO: 3246 - protein, 117 aa, synthetic construct
LQLVESGGGLVQPGGSLRLSCAASGFTLDSYAIGWFRQAPGKEREGVSYISSSGGSTNYADSVKGRFTISRDNAKNTVYLQMNSLKPEDTGVYSCAAAGGYTNSSRYWGQGTSVTVS

SEQ ID NO: 3247 - protein, 117 aa, synthetic construct
LQLVESGGGLVQPGGSLRLSCAASGFTLDSYAIGWFRQAPGKEREGVSYISSSGGSTNYADSVKGRFTISRNNAKNTVYLQMHSLKPEDTAVYSCAAAGGYGNSSRYWGQGTSVTVS

SEQ ID NO: 3248 - protein, 117 aa, synthetic construct
LQLVESGGGLVQPGGSLRLSCAASGFTLDSYAIGWFRQAPGKEREGVSYISSSGGSTNYADSVKGRFTVSRDNAKNTVFLQMNSLKPEDTGVYSCAAAGGYGNSSRYWGQGTSVTVS

SEQ ID NO: 3249 - protein, 117 aa, synthetic construct
LQLVESGGGLVQPGGSLRLSCAASGFTLDSYAIGWFRQAPGKEREGVSYISSSGGSTNYADSVKGRFTVSRDNAKNTVYLQMNSLKPEDTAVYSCAAAGGYGNSSRYWGQGTSVTVS

SEQ ID NO: 3250 - protein, 117 aa, synthetic construct
LQLVESGGGLVQPGGSLRLSCAASGFTLDSYAIGWFRQAPGKEREGVSYISSSGGSTNYADSVKGRFTVSRDNAKNTVYLQMNSLKPEDTAVYSCAAAGGYRNSSRYWGQGTSVTVS

SEQ ID NO: 3251 - protein, 117 aa, synthetic construct
LQLVESGGGLVQPGGSLRLSCAASGFTLDSYAIGWFRQAPGKEREGVSYISSSGGSTNYADSVKGRFTVSRDNAKNTVYLQMNSLKPEDTGVYSCAAAGGYGNSSRYWGQGTSVTVS

SEQ ID NO: 3252 - protein, 117 aa, synthetic construct
LQLVESGGGLVQPGGSLRLSCAASGFTLDSYAIGWFRQAPGKEREGVSYISSSGGSTNYADSVKGRFTVSRDNAKNTVYLQMNSLKPEDTGVYSCAAAGGYRNSSRYWGQGTSVTVS

SEQ ID NO: 3253 - protein, 117 aa, synthetic construct
LQLVESGGGLVQPGGSLRLSCAASGFTLDSYAIGWFRQAPGKEREGVSYISSSGGSTNYAESVKGRFTISRDNAKNTVYLQMNSLKPEDTGVYSCAAAGGYGNSSRYWGQGTSVTVS

SEQ ID NO: 3254 - protein, 117 aa, synthetic construct
LQLVESGGGLVQPGGSLRLSCAASGFTLDYFAIGRFRQAPGKEREGVSYISSSGGSTNYADSVKGRFTISRDNAKNTVYLQMNSLKPEDTGVYSCAAAGGYGNSSRYWGQGTSVTVS

SEQ ID NO: 3255 - protein, 117 aa, synthetic construct
LQLVESGGGLVQPGGSLRLSCAASGFTLDYFAIGWFRQAPGKEREGVAYISSSGGSTNYADSVKGRFTISRDNAKNTVYLQMNSLKPEDTGVYSCAAAGGYGNSSRYWGQGTSVTVS

SEQ ID NO: 3256 - protein, 117 aa, synthetic construct
LQLVESGGGLVQPGGSLRLSCAASGFTLDYFAIGWFRQAPGKEREGVSCISSSGGSTNYADSVKGRFTISRDNAKNTVYLQMNSLKPEDTGVYSCAAAGGYGNSSRYWGQGTSVTVS

SEQ ID NO: 3257 - protein, 117 aa, synthetic construct
LQLVESGGGLVQPGGSLRLSCAASGFTLDYFAIGWFRQAPGKEREGVSYISSSGGSTNYADGVKGRFTISRDNAKNTVYLQMNSLKPEDTGVYSCAAAGGYGNSSRYWGQGTSVTVS

SEQ ID NO: 3258 - protein, 117 aa, synthetic construct
LQLVESGGGLVQPGGSLRLSCAASGFTLDYFAIGWFRQAPGKEREGVSYISSSGGSTNYADGVKGRFTISRDNAKNTVYLQMNSLKPEDTGVYSCAAAGGYRNSSRYWGQGTSVTVS

SEQ ID NO: 3259 - protein, 117 aa, synthetic construct
LQLVESGGGLVQPGGSLRLSCAASGFTLDYFAIGWFRQAPGKEREGVSYISSSGGSTNYADSVKGRFTISRDNAKNTVFLQMNSLKPEDTGVYSCAAAGGYGNSSRYWGPGTSVTVS

SEQ ID NO: 3260 - protein, 117 aa, synthetic construct
LQLVESGGGLVQPGGSLRLSCAASGFTLDYFAIGWFRQAPGKEREGVSYISSSGGSTNYADSVKGRFTISRDNAKNTVFLQMNSLKPEDTGVYSCAAAGGYGNSSRYWGQGTSVTVS

SEQ ID NO: 3261 - protein, 117 aa, synthetic construct
LQLVESGGGLVQPGGSLRLSCAASGFTLDYFAIGWFRQAPGKEREGVSYISSSGGSTNYADSVKGRFTISRDNAKNTVYLQMHNLKPEDTAVYSCAAAGGYGNSSRYWGQGTSVTVS

SEQ ID NO: 3262 - protein, 117 aa, synthetic construct
LQLVESGGGLVQPGGSLRLSCAASGFTLDYFAIGWFRQAPGKEREGVSYISSSGGSTNYADSVKGRFTISRDNAKNTVYLQMHNLKPEDTGVYSCAAAGGYGNSSRYWGQGTSVTVS

SEQ ID NO: 3263 - protein, 117 aa, synthetic construct
LQLVESGGGLVQPGGSLRLSCAASGFTLDYFAIGWFRQAPGKEREGVSYISSSGGSTNYADSVKGRFTISRDNAKNTVYLQMNSLKPEDTAVYSCAAAGGYGNSSRYWGQGTSVTVS

SEQ ID NO: 3264 - protein, 117 aa, synthetic construct
LQLVESGGGLVQPGGSLRLSCAASGFTLDYFAIGWFRQAPGKEREGVSYISSSGGSTNYADSVKGRFTISRDNAKNTVYLQMNSLKPEDTGVYSCAAAGGYGNFSRYWGQGTSVTVS

SEQ ID NO: 3265 - protein, 117 aa, synthetic construct
LQLVESGGGLVQPGGSLRLSCAASGFTLDYFAIGWFRQAPGKEREGVSYISSSGGSTNYADSVKGRFTISRDNAKNTVYLQMNSLKPEDTGVYSCAAAGGYGNSSRHWGQGTSVTVS

SEQ ID NO: 3266 - protein, 117 aa, synthetic construct
LQLVESGGGLVQPGGSLRLSCAASGFTLDYFAIGWFRQAPGKEREGVSYISSSGGSTNYADSVKGRFTISRDNAKNTVYLQMNSLKPEDTGVYSCAAAGGYGNSSRYWGPGTSVTVS

SEQ ID NO: 3267 - protein, 117 aa, synthetic construct
LQLVESGGGLVQPGGSLRLSCAASGFTLDYFAIGWFRQAPGKEREGVSYISSSGGSTNYADSVKGRFTISRDNAKNTVYLQMNSLKPEDTGVYSCAAAGGYGNSSRYWGQGTSVTVS

SEQ ID NO: 3268 - protein, 117 aa, synthetic construct
LQLVESGGGLVQPGGSLRLSCAASGFTLDYFAIGWFRQAPGKEREGVSYISSSGGSTNYADSVKGRFTISRDNAKNTVYLQMNSLKPEDTGVYSCAAAGGYRNSSRYWGQGTSVTVS

SEQ ID NO: 3269 - protein, 117 aa, synthetic construct
LQLVESGGGLVQPGGSLRLSCAASGFTLDYFAIGWFRQAPGKEREGVSYISSSGGSTNYADSVKGRFTISRDNAKNTVYLQMNSLKPEDTGVYYCAAAGGYGNSSRYWGQGTSVTVS

SEQ ID NO: 3270 - protein, 117 aa, synthetic construct
LQLVESGGGLVQPGGSLRLSCAASGFTLDYFAIGWFRQAPGKEREGVSYISSSGGSTNYADSVKGRFTVSRDNAKNTVFLQMNSLKPEDTGVYSCAAAGGYGNSSRYWGQGTSVTVS

SEQ ID NO: 3271 - protein, 117 aa, synthetic construct
LQLVESGGGLVQPGGSLRLSCAASGFTLDYFAIGWFRQAPGKEREGVSYISSSGGSTNYADSVKGRFTVSRDNAKNTVYLQMNSLKPEDTAVYSCAAAGGYGNSSRYWGQGTSVTVS

SEQ ID NO: 3272 - protein, 117 aa, synthetic construct
LQLVESGGGLVQPGGSLRLSCAASGFTLDYFAIGWFRQAPGKEREGVSYISSSGGSTNYADSVKGRFTVSRDNAKNTVYLQMNSLKPEDTGVYSCAAAGGYGNSSRYWGQGTSVTVS

SEQ ID NO: 3273 - protein, 117 aa, synthetic construct
LQLVESGGGLVQPGGSLRLSCAASGFTLDYFAIGWFRQAPGKEREGVSYISSSGGSTNYADSVKGRFTVSRDNAKNTVYLQMNSLKPEDTGVYYCAAAGGYGNSSRYWGQGTSVTVS

SEQ ID NO: 3274 - protein, 117 aa, synthetic construct
LQLVESGGGLVQPGGSLRLSCAASGFTLDYFAIGWFRQAPGKEREGVSYISSSGGSTNYADTVKGRFTISRDNAKNTVYLQMNSLKPEDTGVYSCAAAGGYGNSSRYWGQGTSVTVS

SEQ ID NO: 3275 - protein, 117 aa, synthetic construct
LQLVESGGGLVQPGGSLRLSCAASGFTLDYFAIGWFRQAPGKEREGVSYISSSGGSTNYAESVKGRFTISRDNAKNTVFLQMNSLKPEDTGVYSCAAAGGYGNSSRYWGQGTSVTVS

SEQ ID NO: 3276 - protein, 117 aa, synthetic construct
LQLVESGGGLVQPGGSLRLSCAASGFTLDYFAIGWFRQAPGKEREGVSYISSSGGSTNYAESVKGRFTISRDNAKNTVYLQMNSLKPEDTGVYSCAAAGGYGNSSRYWGQGTSVTVS

SEQ ID NO: 3277 - protein, 117 aa, synthetic construct
LQLVESGGGLVQPGGSLRLSCAASGFTLDYYAIGWFRQAPGKEREGVAYISSSGGSTNYADSVKGRFTISRDNAKNTVFLQMNSLKPEDTGVYSCAAAGGYGNSSRYWGQGTSVTVS

SEQ ID NO: 3278 - protein, 117 aa, synthetic construct
LQLVESGGGLVQPGGSLRLSCAASGFTLDYYAIGWFRQAPGKEREGVAYISSSGGSTNYADSVKGRFTISRDNAKNTVYLQMHSLKPEDTAVYSCAAAGGYGNSSRYWGQGTSVTVS

SEQ ID NO: 3279 - protein, 117 aa, synthetic construct
LQLVESGGGLVQPGGSLRLSCAASGFTLDYYAIGWFRQAPGKEREGVAYISSSGGSTNYADSVKGRFTISRDNAKNTVYLQMNSLKPEDTAVYSCAAAGGYGNSSRYWGQGTSVTVS

SEQ ID NO: 3280 - protein, 117 aa, synthetic construct
LQLVESGGGLVQPGGSLRLSCAASGFTLDYYAIGWFRQAPGKEREGVAYISSSGGSTNYADSVKGRFTISRDNAKNTVYLQMNSLKPEDTGVYSCAAAGGYRNSSRYWGQGTSVTVS

SEQ ID NO: 3281 - protein, 117 aa, synthetic construct
LQLVESGGGLVQPGGSLRLSCAASGFTLDYYAIGWFRQAPGKEREGVAYISSSGGSTNYADSVKGRFTISRDNAKNTVYLQMNSLKPEDTGVYYCAAAGGYRNSSRYWGQGTSVTVS

SEQ ID NO: 3282 - protein, 117 aa, synthetic construct
LQLVESGGGLVQPGGSLRLSCAASGFTLDYYAIGWFRQAPGKEREGVAYISSSGGSTNYADSVKGRFTISRNNAKNTVYLQMHSLKPEDTAVYSCAAAGGYGNSSRYWGQGTSVTVS

SEQ ID NO: 3283 - protein, 117 aa, synthetic construct
LQLVESGGGLVQPGGSLRLSCAASGFTLDYYAIGWFRQAPGKEREGVAYISSSGGSTNYADSVKGRFTISRNNAKNTVYLQMHSLKPEDTGVYSCAAAGGYGNSSRYWGQGTSVTVS

SEQ ID NO: 3284 - protein, 117 aa, synthetic construct
LQLVESGGGLVQPGGSLRLSCAASGFTLDYYAIGWFRQAPGKEREGVAYISSSGGSTNYADSVKGRFTISRNNAKNTVYLQMNSLKPEDTGVYSCAAAGGYGNSSRYWGQGTSVTVS

SEQ ID NO: 3285 - protein, 117 aa, synthetic construct
LQLVESGGGLVQPGGSLRLSCAASGFTLDYYAIGWFRQAPGKEREGVAYISSSGGSTNYADSVKGRFTVSRDNAKNTVYLQMNSLKPEDTGVYSCAAAGGYGNSSRYWGQGTSVTVS

SEQ ID NO: 3286 - protein, 117 aa, synthetic construct
LQLVESGGGLVQPGGSLRLSCAASGFTLDYYAIGWFRQAPGKEREGVPYISSSGGSTNYADSVKGRFTVSRDNAKNTVYLQMNSLKPEDTGVYSCAAAGGYGNSSRYWGQGTSVTVS

SEQ ID NO: 3287 - protein, 117 aa, synthetic construct
LQLVESGGGLVQPGGSLRLSCAASGFTLDYYAIGWFRQAPGKEREGVSCISSSGGSTNYADSVKGRFTISRDNAKNTVFLQMNSLKPEDTGVYSCAAAGGYGNSSRYWGQGTSVTVS

SEQ ID NO: 3288 - protein, 117 aa, synthetic construct
LQLVESGGGLVQPGGSLRLSCAASGFTLDYYAIGWFRQAPGKEREGVSCISSSGGSTNYADSVKGRFTISRDNAKNTVYLQMHNLKPEDTAVYSCAAAGGYGNSSRYWGQGTSVTVS

SEQ ID NO: 3289 - protein, 117 aa, synthetic construct
LQLVESGGGLVQPGGSLRLSCAASGFTLDYYAIGWFRQAPGKEREGVSCISSSGGSTNYADSVKGRFTISRDNAKNTVYLQMNSLKPEDTAVYSCAAAGGYGNFSRYWGQGTSVTVS

SEQ ID NO: 3290 - protein, 117 aa, synthetic construct
LQLVESGGGLVQPGGSLRLSCAASGFTLDYYAIGWFRQAPGKEREGVSCISSSGGSTNYADSVKGRFTISRDNAKNTVYLQMNSLKPEDTAVYSCAAAGGYGNSSRYWGQGTSVTVS

SEQ ID NO: 3291 - protein, 117 aa, synthetic construct
LQLVESGGGLVQPGGSLRLSCAASGFTLDYYAIGWFRQAPGKEREGVSCISSSGGSTNYADSVKGRFTISRDNAKNTVYLQMNSLKPEDTGVYSCAAAGGYGNFSRYWGQGTSVTVS

SEQ ID NO: 3292 - protein, 117 aa, synthetic construct
LQLVESGGGLVQPGGSLRLSCAASGFTLDYYAIGWFRQAPGKEREGVSCISSSGGSTNYADSVKGRFTISRDNAKNTVYLQMNSLKPEDTGVYSCAAAGGYGNSSRYWGQGTSVTVS

SEQ ID NO: 3293 - protein, 117 aa, synthetic construct
LQLVESGGGLVQPGGSLRLSCAASGFTLDYYAIGWFRQAPGKEREGVSCISSSGGSTNYADSVKGRFTISRDNAKNTVYLQMNSLKPEDTGVYSCAAAGGYRNSSRYWGQGTSVTVS

SEQ ID NO: 3294 - protein, 117 aa, synthetic construct
LQLVESGGGLVQPGGSLRLSCAASGFTLDYYAIGWFRQAPGKEREGVSCISSSGGSTNYADSVKGRFTISRDNAKNTVYLQMNSLKPEDTGVYYCAAAGGYGNSSRYWGQGTSVTVS

SEQ ID NO: 3295 - protein, 117 aa, synthetic construct
LQLVESGGGLVQPGGSLRLSCAASGFTLDYYAIGWFRQAPGKEREGVSCISSSGGSTNYADSVKGRFTVSRDNAKNTVYLQMNSLKPEDTAVYSCAAAGGYGNSSRYWGQGTSVTVS

SEQ ID NO: 3296 - protein, 117 aa, synthetic construct
LQLVESGGGLVQPGGSLRLSCAASGFTLDYYAIGWFRQAPGKEREGVSCISSSGGSTNYADSVKGRFTVSRDNAKNTVYLQMNSLKPEDTGVYSCAAAGGYGNSSRYWGQGTSVTVS

SEQ ID NO: 3297 - protein, 117 aa, synthetic construct
LQLVESGGGLVQPGGSLRLSCAASGFTLDYYAIGWFRQAPGKEREGVSCISSSGGSTNYADTVKGRFTISRDNAKNTVYLQMNSLKPEDTGVYSCAAAGGYGNSSRYWGQGTSVTVS

SEQ ID NO: 3298 - protein, 117 aa, synthetic construct
LQLVESGGGLVQPGGSLRLSCAASGFTLDYYAIGWFRQAPGKEREGVSYIRSSGGSTNYADSVKGRFTISRDNAKNTVYLQMNSLKPEDTAVYSCAAAGGYGNSSRYWGQGTSVTVS

SEQ ID NO: 3299 - protein, 117 aa, synthetic construct
LQLVESGGGLVQPGGSLRLSCAASGFTLDYYAIGWFRQAPGKEREGVSYISSSGGSTNYADGVKGRFTISRDNAKNTVYLQMHNLKPEDTAVYSCAAAGGYGNSSRYWGQGTSVTVS

SEQ ID NO: 3300 - protein, 117 aa, synthetic construct
LQLVESGGGLVQPGGSLRLSCAASGFTLDYYAIGWFRQAPGKEREGVSYISSSGGSTNYADGVKGRFTISRDNAKNTVYLQMNSLKPEDSAVYSCAAAGGYGNSSRYWGQGTSVTVS

SEQ ID NO: 3301 - protein, 117 aa, synthetic construct
LQLVESGGGLVQPGGSLRLSCAASGFTLDYYAIGWFRQAPGKEREGVSYISSSGGSTNYADGVKGRFTISRDNAKNTVYLQMNSLKPEDTAIYSCAAAGGYRNSSRFWGQGTSVTVS

SEQ ID NO: 3302 - protein, 117 aa, synthetic construct
LQLVESGGGLVQPGGSLRLSCAASGFTLDYYAIGWFRQAPGKEREGVSYISSSGGSTNYADGVKGRFTISRDNAKNTVYLQMNSLKPEDTAIYSCAAAGGYRNSSRYWGQGTSVTVS

SEQ ID NO: 3303 - protein, 117 aa, synthetic construct
LQLVESGGGLVQPGGSLRLSCAASGFTLDYYAIGWFRQAPGKEREGVSYISSSGGSTNYADGVKGRFTISRDNAKNTVYLQMNSLKPEDTAVYSCAAAGGYGNSSRYWGQGTSVTVS

SEQ ID NO: 3304 - protein, 117 aa, synthetic construct
LQLVESGGGLVQPGGSLRLSCAASGFTLDYYAIGWFRQAPGKEREGVSYISSSGGSTNYADGVKGRFTISRDNAKNTVYLQMNSLKPEDTAVYSCAAAGGYRNSSRYWGQGTSVTVS

SEQ ID NO: 3305 - protein, 117 aa, synthetic construct
LQLVESGGGLVQPGGSLRLSCAASGFTLDYYAIGWFRQAPGKEREGVSYISSSGGSTNYADGVKGRFTISRDNAKNTVYLQMNSLKPEDTGVYSCAAAGGYRNSSRYWGQGTSVTVS

SEQ ID NO: 3306 - protein, 117 aa, synthetic construct
LQLVESGGGLVQPGGSLRLSCAASGFTLDYYAIGWFRQAPGKEREGVSYISSSGGSTNYADGVKGRFTISRDNAKNTVYLQMNSLKPEDTGVYSCAAAGGYTNSSRYWGQGTSVTVS

SEQ ID NO: 3307 - protein, 117 aa, synthetic construct
LQLVESGGGLVQPGGSLRLSCAASGFTLDYYAIGWFRQAPGKEREGVSYISSSGGSTNYADGVKGRFTISRNNAKNTVYLQMHSLKPEDTAVYSCAAAGGYGNSSRYWGQGTSVTVS

SEQ ID NO: 3308 - protein, 117 aa, synthetic construct
LQLVESGGGLVQPGGSLRLSCAASGFTLDYYAIGWFRQAPGKEREGVSYISSSGGSTNYADGVKGRFTVSRDNAKNTVYLQMNSLKPEDTGVYSCAAAGGYGNSSRYWGQGTSVTVS

SEQ ID NO: 3309 - protein, 117 aa, synthetic construct
LQLVESGGGLVQPGGSLRLSCAASGFTLDYYAIGWFRQAPGKEREGVSYISSSGGSTNYADSVKGRFSISRDNAKNTVYLQMNSLKPEDTAVYSCAAAGGYGNSSRYWGQGTSVTVS

SEQ ID NO: 3310 - protein, 117 aa, synthetic construct
LQLVESGGGLVQPGGSLRLSCAASGFTLDYYAIGWFRQAPGKEREGVSYISSSGGSTNYADSVKGRFSISRDNAKNTVYLQMNSLKPEDTGVYSCAAAGGYRNSSRYWGQGTSVTVS

SEQ ID NO: 3311 - protein, 117 aa, synthetic construct
LQLVESGGGLVQPGGSLRLSCAASGFTLDYYAIGWFRQAPGKEREGVSYISSSGGSTNYADSVKGRFSISRDNAKNTVYLQMNSLKPEDTGVYSCAAAGGYTNSSRYWGQGTSVTVS

SEQ ID NO: 3312 - protein, 117 aa, synthetic construct
LQLVESGGGLVQPGGSLRLSCAASGFTLDYYAIGWFRQAPGKEREGVSYISSSGGSTNYADSVKGRFTISRDNAKNTVFLQMNSLKPEDTAVYSCAAAGGYGNSSRYWGQGTSVTVS

SEQ ID NO: 3313 - protein, 117 aa, synthetic construct
LQLVESGGGLVQPGGSLRLSCAASGFTLDYYAIGWFRQAPGKEREGVSYISSSGGSTNYADSVKGRFTISRDNAKNTVFLQMNSLKPEDTAVYSCAAAGGYRNSSRYWGQGTSVTVS

SEQ ID NO: 3314 - protein, 117 aa, synthetic construct
LQLVESGGGLVQPGGSLRLSCAASGFTLDYYAIGWFRQAPGKEREGVSYISSSGGSTNYADSVKGRFTISRDNAKNTVFLQMNSLKPEDTGVYSCAAAGGYRNSSRYWGQGTSVTVS

SEQ ID NO: 3315 - protein, 117 aa, synthetic construct
LQLVESGGGLVQPGGSLRLSCAASGFTLDYYAIGWFRQAPGKEREGVSYISSSGGSTNYADSVKGRFTISRDNAKNTVFLQMNSLKPEDTGVYSCAAAGGYTNSSRYWGQGTSVTVS

SEQ ID NO: 3316 - protein, 117 aa, synthetic construct
LQLVESGGGLVQPGGSLRLSCAASGFTLDYYAIGWFRQAPGKEREGVSYISSSGGSTNYADSVKGRFTISRDNAKNTVSLQMNSLKPEDTAVYSCAAAGGYGNSSRYWGQGTSVTVS

SEQ ID NO: 3317 - protein, 117 aa, synthetic construct
LQLVESGGGLVQPGGSLRLSCAASGFTLDYYAIGWFRQAPGKEREGVSYISSSGGSTNYADSVKGRFTISRDNAKNTVSLQMNSLKPEDTGVYSCAAAGGYRNSSRYWGQGTSVTVS

SEQ ID NO: 3318 - protein, 117 aa, synthetic construct
LQLVESGGGLVQPGGSLRLSCAASGFTLDYYAIGWFRQAPGKEREGVSYISSSGGSTNYADSVKGRFTISRDNAKNTVYLQMHNLKPEDTAVYSCAAAGGYGNSSRYWGQGTSVTVS

SEQ ID NO: 3319 - protein, 117 aa, synthetic construct
LQLVESGGGLVQPGGSLRLSCAASGFTLDYYAIGWFRQAPGKEREGVSYISSSGGSTNYADSVKGRFTISRDNAKNTVYLQMHNLKPEDTAVYSCAAAGGYRNSSRFWGQGTSVTVS

SEQ ID NO: 3320 - protein, 117 aa, synthetic construct
LQLVESGGGLVQPGGSLRLSCAASGFTLDYYAIGWFRQAPGKEREGVSYISSSGGSTNYADSVKGRFTISRDNAKNTVYLQMHNLKPEDTAVYSCAAAGGYRNSSRYWGQGTSVTVS

SEQ ID NO: 3321 - protein, 117 aa, synthetic construct
LQLVESGGGLVQPGGSLRLSCAASGFTLDYYAIGWFRQAPGKEREGVSYISSSGGSTNYADSVKGRFTISRDNAKNTVYLQMHNLKPEDTGVYSCAAAGGYGNSSRYWGQGTSVTVS

SEQ ID NO: 3322 - protein, 117 aa, synthetic construct
LQLVESGGGLVQPGGSLRLSCAASGFTLDYYAIGWFRQAPGKEREGVSYISSSGGSTNYADSVKGRFTISRDNAKNTVYLQMHNLKPEDTGVYSCAAAGGYRNSSRYWGQGTSVTVS

SEQ ID NO: 3323 - protein, 117 aa, synthetic construct
LQLVESGGGLVQPGGSLRLSCAASGFTLDYYAIGWFRQAPGKEREGVSYISSSGGSTNYADSVKGRFTISRDNAKNTVYLQMHSLKPEDTAVYSCAAAGGYGNSSRYWGQGTSVTVS

SEQ ID NO: 3324 - protein, 117 aa, synthetic construct
LQLVESGGGLVQPGGSLRLSCAASGFTLDYYAIGWFRQAPGKEREGVSYISSSGGSTNYADSVKGRFTISRDNAKNTVYLQMHSLKPEDTAVYSCAAAGGYRNSSRYWGQGTSVTVS

SEQ ID NO: 3325 - protein, 117 aa, synthetic construct
LQLVESGGGLVQPGGSLRLSCAASGFTLDYYAIGWFRQAPGKEREGVSYISSSGGSTNYADSVKGRFTISRDNAKNTVYLQMNSLKPEDTAIYSCAAAGGYRNSSRYWGQGTSVTVS

SEQ ID NO: 3326 - protein, 117 aa, synthetic construct
LQLVESGGGLVQPGGSLRLSCAASGFTLDYYAIGWFRQAPGKEREGVSYISSSGGSTNYADSVKGRFTISRDNAKNTVYLQMNSLKPEDTAVYSCAAAGCYGNSSRYWGQGTSVTVS

SEQ ID NO: 3327 - protein, 117 aa, synthetic construct
LQLVESGGGLVQPGGSLRLSCAASGFTLDYYAIGWFRQAPGKEREGVSYISSSGGSTNYADSVKGRFTISRDNAKNTVYLQMNSLKPEDTAVYSCAAAGGYGNFSRYWGQGTSVTVS

SEQ ID NO: 3328 - protein, 117 aa, synthetic construct
LQLVESGGGLVQPGGSLRLSCAASGFTLDYYAIGWFRQAPGKEREGVSYISSSGGSTNYADSVKGRFTISRDNAKNTVYLQMNSLKPEDTAVYSCAAAGGYGNSPRYWGQGTSVTVS

SEQ ID NO: 3329 - protein, 117 aa, synthetic construct
LQLVESGGGLVQPGGSLRLSCAASGFTLDYYAIGWFRQAPGKEREGVSYISSSGGSTNYADSVKGRFTISRDNAKNTVYLQMNSLKPEDTAVYSCAAAGGYGNSSRFWGQGTSVTVS

SEQ ID NO: 3330 - protein, 117 aa, synthetic construct
LQLVESGGGLVQPGGSLRLSCAASGFTLDYYAIGWFRQAPGKEREGVSYISSSGGSTNYADSVKGRFTISRDNAKNTVYLQMNSLKPEDTAVYSCAAAGGYGNSSRHWGQGTSVTVS

SEQ ID NO: 3331 - protein, 117 aa, synthetic construct
LQLVESGGGLVQPGGSLRLSCAASGFTLDYYAIGWFRQAPGKEREGVSYISSSGGSTNYADSVKGRFTISRDNAKNTVYLQMNSLKPEDTAVYSCAAAGGYGNSSRYWGPGTSVTVS

SEQ ID NO: 3332 - protein, 117 aa, synthetic construct
LQLVESGGGLVQPGGSLRLSCAASGFTLDYYAIGWFRQAPGKEREGVSYISSSGGSTNYADSVKGRFTISRDNAKNTVYLQMNSLKPEDTAVYSCAAAGGYGNSSRYWGQGASVTVS

SEQ ID NO: 3333 - protein, 117 aa, synthetic construct
LQLVESGGGLVQPGGSLRLSCAASGFTLDYYAIGWFRQAPGKEREGVSYISSSGGSTNYADSVKGRFTISRDNAKNTVYLQMNSLKPEDTAVYSCAAAGGYGNSSRYWGQGTSVTVS

SEQ ID NO: 3334 - protein, 117 aa, synthetic construct
LQLVESGGGLVQPGGSLRLSCAASGFTLDYYAIGWFRQAPGKEREGVSYISSSGGSTNYADSVKGRFTISRDNAKNTVYLQMNSLKPEDTAVYSCAAAGGYRNSPRYWGQGTSVTVS

SEQ ID NO: 3335 - protein, 117 aa, synthetic construct
LQLVESGGGLVQPGGSLRLSCAASGFTLDYYAIGWFRQAPGKEREGVSYISSSGGSTNYADSVKGRFTISRDNAKNTVYLQMNSLKPEDTAVYSCAAAGGYRNSSRYWGQGASVTVS

SEQ ID NO: 3336 - protein, 117 aa, synthetic construct
LQLVESGGGLVQPGGSLRLSCAASGFTLDYYAIGWFRQAPGKEREGVSYISSSGGSTNYADSVKGRFTISRDNAKNTVYLQMNSLKPEDTAVYSCAAAGGYTNSSRYWGQGTSVTVS

SEQ ID NO: 3337 - protein, 117 aa, synthetic construct
LQLVESGGGLVQPGGSLRLSCAASGFTLDYYAIGWFRQAPGKEREGVSYISSSGGSTNYADSVKGRFTISRDNAKNTVYLQMNSLKPEDTAVYSCAAAVGYGNSSRYWGQGTSVTVS

SEQ ID NO: 3338 - protein, 117 aa, synthetic construct
LQLVESGGGLVQPGGSLRLSCAASGFTLDYYAIGWFRQAPGKEREGVSYISSSGGSTNYADSVKGRFTISRDNAKNTVYLQMNSLKPEDTGVYSCAAAGGYCNSSRYWGQGTSVTVS

SEQ ID NO: 3339 - protein, 117 aa, synthetic construct
LQLVESGGGLVQPGGSLRLSCAASGFTLDYYAIGWFRQAPGKEREGVSYISSSGGSTNYADSVKGRFTISRDNAKNTVYLQMNSLKPEDTGVYSCAAAGGYDNSSRYWGQGTSVTVS

SEQ ID NO: 3340 - protein, 117 aa, synthetic construct
LQLVESGGGLVQPGGSLRLSCAASGFTLDYYAIGWFRQAPGKEREGVSYISSSGGSTNYADSVKGRFTISRDNAKNTVYLQMNSLKPEDTGVYSCAAAGGYRNSPRYWGQGTSVTVS

SEQ ID NO: 3341 - protein, 117 aa, synthetic construct
LQLVESGGGLVQPGGSLRLSCAASGFTLDYYAIGWFRQAPGKEREGVSYISSSGGSTNYADSVKGRFTISRDNAKNTVYLQMNSLKPEDTGVYSCAAAGGYRNSSRCWGQGTSVTVS

SEQ ID NO: 3342 - protein, 117 aa, synthetic construct
LQLVESGGGLVQPGGSLRLSCAASGFTLDYYAIGWFRQAPGKEREGVSYISSSGGSTNYADSVKGRFTISRDNAKNTVYLQMNSLKPEDTGVYSCAAAGGYRNSSRFWGQGTSVTVS

SEQ ID NO: 3343 - protein, 117 aa, synthetic construct
LQLVESGGGLVQPGGSLRLSCAASGFTLDYYAIGWFRQAPGKEREGVSYISSSGGSTNYADSVKGRFTISRDNAKNTVYLQMNSLKPEDTGVYSCAAAGGYRNSSRHWGQGTSVTVS

SEQ ID NO: 3344 - protein, 117 aa, synthetic construct
LQLVESGGGLVQPGGSLRLSCAASGFTLDYYAIGWFRQAPGKEREGVSYISSSGGSTNYADSVKGRFTISRDNAKNTVYLQMNSLKPEDTGVYSCAAAGGYRNSSRYWGPGTSVTVS

SEQ ID NO: 3345 - protein, 117 aa, synthetic construct
LQLVESGGGLVQPGGSLRLSCAASGFTLDYYAIGWFRQAPGKEREGVSYISSSGGSTNYADSVKGRFTISRDNAKNTVYLQMNSLKPEDTGVYSCAAAGGYRNSSRYWGQGASVTVS

SEQ ID NO: 3346 - protein, 117 aa, synthetic construct
LQLVESGGGLVQPGGSLRLSCAASGFTLDYYAIGWFRQAPGKEREGVSYISSSGGSTNYADSVKGRFTISRDNAKNTVYLQMNSLKPEDTGVYSCAAAGGYRNSSRYWGQGTSVTVS

SEQ ID NO: 3347 - protein, 117 aa, synthetic construct
LQLVESGGGLVQPGGSLRLSCAASGFTLDYYAIGWFRQAPGKEREGVSYISSSGGSTNYADSVKGRFTISRDNAKNTVYLQMNSLKPEDTGVYSCAAAGGYRNSSRYWGQGTTVTVS

SEQ ID NO: 3348 - protein, 117 aa, synthetic construct
LQLVESGGGLVQPGGSLRLSCAASGFTLDYYAIGWFRQAPGKEREGVSYISSSGGSTNYADSVKGRFTISRDNAKNTVYLQMNSLKPEDTGVYSCAAAGGYRNSSRYWGQVTSVTVS

SEQ ID NO: 3349 - protein, 117 aa, synthetic construct
LQLVESGGGLVQPGGSLRLSCAASGFTLDYYAIGWFRQAPGKEREGVSYISSSGGSTNYADSVKGRFTISRDNAKNTVYLQMNSLKPEDTGVYSCAAAGGYSNSSRYWGQGTSVTVS

SEQ ID NO: 3350 - protein, 117 aa, synthetic construct
LQLVESGGGLVQPGGSLRLSCAASGFTLDYYAIGWFRQAPGKEREGVSYISSSGGSTNYADSVKGRFTISRDNAKNTVYLQMNSLKPEDTGVYSCAAAGGYTNSSRHWGQGTSVTVS

SEQ ID NO: 3351 - protein, 117 aa, synthetic construct
LQLVESGGGLVQPGGSLRLSCAASGFTLDYYAIGWFRQAPGKEREGVSYISSSGGSTNYADSVKGRFTISRDNAKNTVYLQMNSLKPEDTGVYSCAAAGGYTNSSRYWGPGTSVTVS

SEQ ID NO: 3352 - protein, 117 aa, synthetic construct
LQLVESGGGLVQPGGSLRLSCAASGFTLDYYAIGWFRQAPGKEREGVSYISSSGGSTNYADSVKGRFTISRDNAKNTVYLQMNSLKPEDTGVYSCAAAGGYTNSSRYWGQGTSVTVS

SEQ ID NO: 3353 - protein, 117 aa, synthetic construct
LQLVESGGGLVQPGGSLRLSCAASGFTLDYYAIGWFRQAPGKEREGVSYISSSGGSTNYADSVKGRFTISRDNAKNTVYLQMNSLKPEDTRVYSCAAAGGYGNSSRHWGQGTSVTVS

SEQ ID NO: 3354 - protein, 117 aa, synthetic construct
LQLVESGGGLVQPGGSLRLSCAASGFTLDYYAIGWFRQAPGKEREGVSYISSSGGSTNYADSVKGRFTISRDNTKNTVYLQMNSLKPEDTAVYSCAAAGGYGNSSRYWGQGTSVTVS

SEQ ID NO: 3355 - protein, 117 aa, synthetic construct
LQLVESGGGLVQPGGSLRLSCAASGFTLDYYAIGWFRQAPGKEREGVSYISSSGGSTNYADSVKGRFTISRNNAKNTVYLQMHSLKPEDTAVYSCAAAGGYGNSSRHWGQGTSVTVS

SEQ ID NO: 3356 - protein, 117 aa, synthetic construct
LQLVESGGGLVQPGGSLRLSCAASGFTLDYYAIGWFRQAPGKEREGVSYISSSGGSTNYADSVKGRFTISRNNAKNTVYLQMHSLKPEDTAVYSCAAAGGYGNSSRYWGQGTSVTVS

SEQ ID NO: 3357 - protein, 117 aa, synthetic construct
LQLVESGGGLVQPGGSLRLSCAASGFTLDYYAIGWFRQAPGKEREGVSYISSSGGSTNYADSVKGRFTISRNNAKNTVYLQMHSLKPEDTAVYSCAAAGGYRNSSRYWGQGTSVTVS

SEQ ID NO: 3358 - protein, 117 aa, synthetic construct
LQLVESGGGLVQPGGSLRLSCAASGFTLDYYAIGWFRQAPGKEREGVSYISSSGGSTNYADSVKGRFTISRNNAKNTVYLQMHSLKPEDTGVYSCAAAGGYGNSSRYWGQGTSVTVS

SEQ ID NO: 3359 - protein, 117 aa, synthetic construct
LQLVESGGGLVQPGGSLRLSCAASGFTLDYYAIGWFRQAPGKEREGVSYISSSGGSTNYADSVKGRFTISRNNAKNTVYLQMHSLKPEDTGVYSCAAAGGYRNSSRYWGQGTSVTVS

SEQ ID NO: 3360 - protein, 117 aa, synthetic construct
LQLVESGGGLVQPGGSLRLSCAASGFTLDYYAIGWFRQAPGKEREGVSYISSSGGSTNYADSVKGRFTISRNNAKNTVYLQMNSLKPEDTAVYSCAAAGGYGNSSRYWGQGTSVTVS

SEQ ID NO: 3361 - protein, 117 aa, synthetic construct
LQLVESGGGLVQPGGSLRLSCAASGFTLDYYAIGWFRQAPGKEREGVSYISSSGGSTNYADSVKGRFTISRNNAKNTVYLQMNSLKPEDTAVYSCAAAGGYRNSSRYWGQGTSVTVS

SEQ ID NO: 3362 - protein, 117 aa, synthetic construct
LQLVESGGGLVQPGGSLRLSCAASGFTLDYYAIGWFRQAPGKEREGVSYISSSGGSTNYADSVKGRFTISRNNAKNTVYLQMNSLKPEDTGVYSCAAAGGYGNSSRYWGQGTSVTVS

SEQ ID NO: 3363 - protein, 117 aa, synthetic construct
LQLVESGGGLVQPGGSLRLSCAASGFTLDYYAIGWFRQAPGKEREGVSYISSSGGSTNYADSVKGRFTISRNNAKNTVYLQMNSLKPEDTGVYSCAAAGGYRNSSRYWGQGTSVTVS

SEQ ID NO: 3364 - protein, 117 aa, synthetic construct
LQLVESGGGLVQPGGSLRLSCAASGFTLDYYAIGWFRQAPGKEREGVSYISSSGGSTNYADSVKGRFTVSRDNAKNTVFLQMNSLKPEDTGVYSCAAAGGYGNSSRYWGQGTSVTVS

SEQ ID NO: 3365 - protein, 117 aa, synthetic construct
LQLVESGGGLVQPGGSLRLSCAASGFTLDYYAIGWFRQAPGKEREGVSYISSSGGSTNYADSVKGRFTVSRDNAKNTVFLQMNSLKPEDTGVYSCAAAGGYRNSSRYWGQGTSVTVS

SEQ ID NO: 3366 - protein, 117 aa, synthetic construct
LQLVESGGGLVQPGGSLRLSCAASGFTLDYYAIGWFRQAPGKEREGVSYISSSGGSTNYADSVKGRFTVSRDNAKNTVSLQMNSLKPEDTGVYSCAAAGGYGNSSRYWGQGTSVTVS

SEQ ID NO: 3367 - protein, 117 aa, synthetic construct
LQLVESGGGLVQPGGSLRLSCAASGFTLDYYAIGWFRQAPGKEREGVSYISSSGGSTNYADSVKGRFTVSRDNAKNTVYLQMHNLKPEDTAVYSCAAAGGYGNSSRYWGQGTSVTVS

SEQ ID NO: 3368 - protein, 117 aa, synthetic construct
LQLVESGGGLVQPGGSLRLSCAASGFTLDYYAIGWFRQAPGKEREGVSYISSSGGSTNYADSVKGRFTVSRDNAKNTVYLQMHNLKPEDTAVYSCAAAGGYRNSSRYWGQGTSVTVS

SEQ ID NO: 3369 - protein, 117 aa, synthetic construct
LQLVESGGGLVQPGGSLRLSCAASGFTLDYYAIGWFRQAPGKEREGVSYISSSGGSTNYADSVKGRFTVSRDNAKNTVYLQMHNLKPEDTGVYSCAAAGGYGNSSRYWGQGTSVTVS

SEQ ID NO: 3370 - protein, 117 aa, synthetic construct
LQLVESGGGLVQPGGSLRLSCAASGFTLDYYAIGWFRQAPGKEREGVSYISSSGGSTNYADSVKGRFTVSRDNAKNTVYLQMHSLKPEDTAVYSCAAAGGYGNSSRYWGQGTSVTVS

SEQ ID NO: 3371 - protein, 117 aa, synthetic construct
LQLVESGGGLVQPGGSLRLSCAASGFTLDYYAIGWFRQAPGKEREGVSYISSSGGSTNYADSVKGRFTVSRDNAKNTVYLQMHSLKPEDTGVYSCAAAGGYGNSSRYWGQGTSVTVS

SEQ ID NO: 3372 - protein, 117 aa, synthetic construct
LQLVESGGGLVQPGGSLRLSCAASGFTLDYYAIGWFRQAPGKEREGVSYISSSGGSTNYADSVKGRFTVSRDNAKNTVYLQMNSLKPEDSGVYSCAAAGGYGNSSRYWGQGTSVTVS

SEQ ID NO: 3373 - protein, 117 aa, synthetic construct
LQLVESGGGLVQPGGSLRLSCAASGFTLDYYAIGWFRQAPGKEREGVSYISSSGGSTNYADSVKGRFTVSRDNAKNTVYLQMNSLKPEDTAVYSCAAAGGYGNSSRYWGQGTSVTVS

SEQ ID NO: 3374 - protein, 117 aa, synthetic construct
LQLVESGGGLVQPGGSLRLSCAASGFTLDYYAIGWFRQAPGKEREGVSYISSSGGSTNYADSVKGRFTVSRDNAKNTVYLQMNSLKPEDTAVYSCAAAGGYRNSSRYWGQGTSVTVS

SEQ ID NO: 3375 - protein, 117 aa, synthetic construct
LQLVESGGGLVQPGGSLRLSCAASGFTLDYYAIGWFRQAPGKEREGVSYISSSGGSTNYADSVKGRFTVSRDNAKNTVYLQMNSLKPEDTAVYSCAAAGGYTNSSRYWGQGTSVTVS

SEQ ID NO: 3376 - protein, 117 aa, synthetic construct
LQLVESGGGLVQPGGSLRLSCAASGFTLDYYAIGWFRQAPGKEREGVSYISSSGGSTNYADSVKGRFTVSRDNAKNTVYLQMNSLKPEDTGVYACAAAGGYGNSSRYWGQGTSVTVS

SEQ ID NO: 3377 - protein, 117 aa, synthetic construct
LQLVESGGGLVQPGGSLRLSCAASGFTLDYYAIGWFRQAPGKEREGVSYISSSGGSTNYADSVKGRFTVSRDNAKNTVYLQMNSLKPEDTGVYPCAAAGGYGNSSRYWGQGTSVTVS

SEQ ID NO: 3378 - protein, 117 aa, synthetic construct
LQLVESGGGLVQPGGSLRLSCAASGFTLDYYAIGWFRQAPGKEREGVSYISSSGGSTNYADSVKGRFTVSRDNAKNTVYLQMNSLKPEDTGVYSCAAAGCYGNSSRYWGQGTSVTVS

SEQ ID NO: 3379 - protein, 117 aa, synthetic construct
LQLVESGGGLVQPGGSLRLSCAASGFTLDYYAIGWFRQAPGKEREGVSYISSSGGSTNYADSVKGRFTVSRDNAKNTVYLQMNSLKPEDTGVYSCAAAGGYGNCSRYWGQGTSVTVS

SEQ ID NO: 3380 - protein, 117 aa, synthetic construct
LQLVESGGGLVQPGGSLRLSCAASGFTLDYYAIGWFRQAPGKEREGVSYISSSGGSTNYADSVKGRFTVSRDNAKNTVYLQMNSLKPEDTGVYSCAAAGGYGNFSRYWGQGTSVTVS

SEQ ID NO: 3381 - protein, 117 aa, synthetic construct
LQLVESGGGLVQPGGSLRLSCAASGFTLDYYAIGWFRQAPGKEREGVSYISSSGGSTNYADSVKGRFTVSRDNAKNTVYLQMNSLKPEDTGVYSCAAAGGYGNSPRYWGQGTSVTVS

SEQ ID NO: 3382 - protein, 117 aa, synthetic construct
LQLVESGGGLVQPGGSLRLSCAASGFTLDYYAIGWFRQAPGKEREGVSYISSSGGSTNYADSVKGRFTVSRDNAKNTVYLQMNSLKPEDTGVYSCAAAGGYGNSSRFWGQGTSVTVS

SEQ ID NO: 3383 - protein, 117 aa, synthetic construct
LQLVESGGGLVQPGGSLRLSCAASGFTLDYYAIGWFRQAPGKEREGVSYISSSGGSTNYADSVKGRFTVSRDNAKNTVYLQMNSLKPEDTGVYSCAAAGGYGNSSRHWGQGTSVTVS

SEQ ID NO: 3384 - protein, 117 aa, synthetic construct
LQLVESGGGLVQPGGSLRLSCAASGFTLDYYAIGWFRQAPGKEREGVSYISSSGGSTNYADSVKGRFTVSRDNAKNTVYLQMNSLKPEDTGVYSCAAAGGYGNSSRYCGQGTSVTVS

SEQ ID NO: 3385 - protein, 117 aa, synthetic construct
LQLVESGGGLVQPGGSLRLSCAASGFTLDYYAIGWFRQAPGKEREGVSYISSSGGSTNYADSVKGRFTVSRDNAKNTVYLQMNSLKPEDTGVYSCAAAGGYGNSSRYWGPGTSVTVS

SEQ ID NO: 3386 - protein, 117 aa, synthetic construct
LQLVESGGGLVQPGGSLRLSCAASGFTLDYYAIGWFRQAPGKEREGVSYISSSGGSTNYADSVKGRFTVSRDNAKNTVYLQMNSLKPEDTGVYSCAAAGGYGNSSRYWGQGASVTVS

SEQ ID NO: 3387 - protein, 117 aa, synthetic construct
LQLVESGGGLVQPGGSLRLSCAASGFTLDYYAIGWFRQAPGKEREGVSYISSSGGSTNYADSVKGRFTVSRDNAKNTVYLQMNSLKPEDTGVYSCAAAGGYGNSSRYWGQGTSVTVP

SEQ ID NO: 3388 - protein, 117 aa, synthetic construct
LQLVESGGGLVQPGGSLRLSCAASGFTLDYYAIGWFRQAPGKEREGVSYISSSGGSTNYADSVKGRFTVSRDNAKNTVYLQMNSLKPEDTGVYSCAAAGGYGNSSRYWGQGTSVTVS

SEQ ID NO: 3389 - protein, 117 aa, synthetic construct
LQLVESGGGLVQPGGSLRLSCAASGFTLDYYAIGWFRQAPGKEREGVSYISSSGGSTNYADSVKGRFTVSRDNAKNTVYLQMNSLKPEDTGVYSCAAAGGYGNSSRYWGQGTTVTVS

SEQ ID NO: 3390 - protein, 117 aa, synthetic construct
LQLVESGGGLVQPGGSLRLSCAASGFTLDYYAIGWFRQAPGKEREGVSYISSSGGSTNYADSVKGRFTVSRDNAKNTVYLQMNSLKPEDTGVYSCAAAGGYGNSSRYWGQVTSVTVS

SEQ ID NO: 3391 - protein, 117 aa, synthetic construct
LQLVESGGGLVQPGGSLRLSCAASGFTLDYYAIGWFRQAPGKEREGVSYISSSGGSTNYADSVKGRFTVSRDNAKNTVYLQMNSLKPEDTGVYSCAAAGGYGNSTRYWGQGTSVTVS

SEQ ID NO: 3392 - protein, 117 aa, synthetic construct
LQLVESGGGLVQPGGSLRLSCAASGFTLDYYAIGWFRQAPGKEREGVSYISSSGGSTNYADSVKGRFTVSRDNAKNTVYLQMNSLKPEDTGVYSCAAAGGYRNSSRFWGQGTSVTVS

SEQ ID NO: 3393 - protein, 117 aa, synthetic construct
LQLVESGGGLVQPGGSLRLSCAASGFTLDYYAIGWFRQAPGKEREGVSYISSSGGSTNYADSVKGRFTVSRDNAKNTVYLQMNSLKPEDTGVYSCAAAGGYRNSSRYWGQGTSVTVS

SEQ ID NO: 3394 - protein, 117 aa, synthetic construct
LQLVESGGGLVQPGGSLRLSCAASGFTLDYYAIGWFRQAPGKEREGVSYISSSGGSTNYADSVKGRFTVSRDNAKNTVYLQMNSLKPEDTGVYSCAAAGGYTNSSRYWGQGTSVTVS

SEQ ID NO: 3395 - protein, 117 aa, synthetic construct
LQLVESGGGLVQPGGSLRLSCAASGFTLDYYAIGWFRQAPGKEREGVSYISSSGGSTNYADSVKGRFTVSRDNAKNTVYLQMNSLKPEDTGVYYCAAAGGYGNSSRYWGQGTSVTVS

SEQ ID NO: 3396 - protein, 117 aa, synthetic construct
LQLVESGGGLVQPGGSLRLSCAASGFTLDYYAIGWFRQAPGKEREGVSYISSSGGSTNYADSVKGRFTVSRNNAKNTVYLQMNSLKPEDTGVYSCAAAGGYGNSSRYWGQGTSVTVS

SEQ ID NO: 3397 - protein, 117 aa, synthetic construct
LQLVESGGGLVQPGGSLRLSCAASGFTLDYYAIGWFRQAPGKEREGVSYISSSGGSTNYADTVKGRFTISRDNAKNTVFLQMNSLKPEDTGVYSCAAAGGYGNSSRYWGQGTSVTVS

SEQ ID NO: 3398 - protein, 117 aa, synthetic construct
LQLVESGGGLVQPGGSLRLSCAASGFTLDYYAIGWFRQAPGKEREGVSYISSSGGSTNYADTVKGRFTISRDNAKNTVYLQMNSLKPEDSAVYSCAAAGGYGNSSRYWGQGTSVTVS

SEQ ID NO: 3399 - protein, 117 aa, synthetic construct
LQLVESGGGLVQPGGSLRLSCAASGFTLDYYAIGWFRQAPGKEREGVSYISSSGGSTNYADTVKGRFTISRDNAKNTVYLQMNSLKPEDTAVYSCAAAGGYGNSSRYWGQGTSVTVS

SEQ ID NO: 3400 - protein, 117 aa, synthetic construct
LQLVESGGGLVQPGGSLRLSCAASGFTLDYYAIGWFRQAPGKEREGVSYISSSGGSTNYADTVKGRFTISRDNAKNTVYLQMNSLKPEDTGVYSCAAAGGYGNSSRYWGQGTSVTVS

SEQ ID NO: 3401 - protein, 117 aa, synthetic construct
LQLVESGGGLVQPGGSLRLSCAASGFTLDYYAIGWFRQAPGKEREGVSYISSSGGSTNYADTVKGRFTISRDNAKNTVYLQMNSLKPEDTGVYSCAAAGGYRNSSRYWGQGTSVTVS

SEQ ID NO: 3402 - protein, 117 aa, synthetic construct
LQLVESGGGLVQPGGSLRLSCAASGFTLDYYAIGWFRQAPGKEREGVSYISSSGGSTNYADTVKGRFTVSRDNAKNTVYLQMNSLKPEDTGVYSCAAAGGYGNSSRYWGQGTSVTVS

SEQ ID NO: 3403 - protein, 117 aa, synthetic construct
LQLVESGGGLVQPGGSLRLSCAASGFTLDYYAIGWFRQAPGKEREGVSYISSSGGSTNYAESVKGRFTISRDNAKNTVFLQMNSLKPEDTAVYSCAAAGGYGNSSRYWGQGTSVTVS

SEQ ID NO: 3404 - protein, 117 aa, synthetic construct
LQLVESGGGLVQPGGSLRLSCAASGFTLDYYAIGWFRQAPGKEREGVSYISSSGGSTNYAESVKGRFTISRDNAKNTVYLQMHNLKPEDTAVYSCAAAGGYGNSSRYWGQGTSVTVS

SEQ ID NO: 3405 - protein, 117 aa, synthetic construct
LQLVESGGGLVQPGGSLRLSCAASGFTLDYYAIGWFRQAPGKEREGVSYISSSGGSTNYAESVKGRFTISRDNAKNTVYLQMNSLKPEDTAVYSCAAAGGYGNSSRYWGQGTSVTVS

SEQ ID NO: 3406 - protein, 117 aa, synthetic construct
LQLVESGGGLVQPGGSLRLSCAASGFTLDYYAIGWFRQAPGKEREGVSYISSSGGSTNYAESVKGRFTISRDNAKNTVYLQMNSLKPEDTAVYSCAAAGGYRNSSRYWGQGTSVTVS

SEQ ID NO: 3407 - protein, 117 aa, synthetic construct
LQLVESGGGLVQPGGSLRLSCAASGFTLDYYAIGWFRQAPGKEREGVSYISSSGGSTNYAESVKGRFTISRDNAKNTVYLQMNSLKPEDTGVYSCAAAGGYRNSSRYWGQGTSVTVS

SEQ ID NO: 3408 - protein, 117 aa, synthetic construct
LQLVESGGGLVQPGGSLRLSCAASGFTLDYYAIGWFRQAPGKEREGVSYISSSGGSTNYAESVKGRFTISRDNAKNTVYLQMNSLKPEDTGVYSCAAAGGYTNSSRYWGQGTSVTVS

SEQ ID NO: 3409 - protein, 117 aa, synthetic construct
LQLVESGGGLVQPGGSLRLSCAASGFTLDYYAIGWFRQAPGKEREGVSYISSSGGSTNYAESVKGRFTISRNNAKNTVYLQMNSLKPEDTGVYSCAAAGGYGNSSRYWGQGTSVTVS

SEQ ID NO: 3410 - protein, 117 aa, synthetic construct
LQLVESGGGLVQPGGSLRLSCAASGFTLDYYAIGWFRQAPGKEREGVSYISSSGGSTNYAESVKGRFTVSRDNAKNTVYLQMNSLKPEDTAVYSCAAAGGYGNSSRYWGQGTSVTVS

SEQ ID NO: 3411 - protein, 117 aa, synthetic construct
LQLVESGGGLVQPGGSLRLSCAASGFTLDYYAIGWFRQAPGKEREGVSYISSSGGSTNYAESVKGRFTVSRDNAKNTVYLQMNSLKPEDTGVYSCAAAGGYGNSSRYWGQGTSVTVS

SEQ ID NO: 3412 - protein, 117 aa, synthetic construct
LQLVESGGGLVQPGGSLRLSCAASGFTLDYYAIGWFRQAPGKEREWVSYISSSGGSTNYADSVKGRFTISRDNAKNTVYLQMNSLKPEDTAVYSCAAAGGYGNSSRYWGQGTSVTVS

SEQ ID NO: 3413 - protein, 117 aa, synthetic construct
LQLVESGGGLVQPGGSLRLSCAASGFTLDYYAIGWSRQAPGKEREGVSCISSSGGSTNYADSVKGRFSISRDNAKNTVYLQMNSLKPEDTGVYSCAAAGGYGNSSRYWGQGTSVTVS

SEQ ID NO: 3414 - protein, 117 aa, synthetic construct
LQLVESGGGLVQPGGSLRLSCAASGFTLDYYAIGWSRQAPGKEREGVSCISSSGGSTNYADSVKGRFTISRDNAKNTVFLQMNSLKPEDTGVYSCAAAGGYGNSSRYWGQGTSVTVS

SEQ ID NO: 3415 - protein, 117 aa, synthetic construct
LQLVESGGGLVQPGGSLRLSCAASGFTLDYYAIGWSRQAPGKEREGVSCISSSGGSTNYADSVKGRFTISRDNAKNTVYLQMNSLKPEDTGVYSCAAAGGYGNSSRHWGQGTSVTVS

SEQ ID NO: 3416 - protein, 117 aa, synthetic construct
LQLVESGGGLVQPGGSLRLSCAASGFTLDYYAIGWSRQAPGKEREGVSCISSSGGSTNYADSVKGRFTISRDNAKNTVYLQMNSLKPEDTGVYSCAAAGGYGNSSRYWGQGTSVTVS

SEQ ID NO: 3417 - protein, 117 aa, synthetic construct
LQLVESGGGLVQPGGSLRLSCAASGFTLDYYAIGWSRQAPGKEREGVSCISSSGGSTNYADSVKGRFTISRDNAKNTVYLQMNSLKPEDTGVYSCAAAGGYRNSSRYWGQGTSVTVS

SEQ ID NO: 3418 - protein, 117 aa, synthetic construct
LQLVESGGGLVQPGGSLRLSCAASGFTLDYYAIGWSRQAPGKEREGVSCISSSGGSTNYADSVKGRFTISRDNAKNTVYLQMNSLKPEDTGVYYCAAAGGYGNSSRYWGQGTSVTVS

SEQ ID NO: 3419 - protein, 117 aa, synthetic construct
LQLVESGGGLVQPGGSLRLSCAASGFTLDYYAIGWSRQAPGKEREGVSCISSSGGSTNYADSVKGRFTVSRDNAKNTVYLQMNSLKPEDTGVYSCAAAGGYGNSSRYWGQGTSVTVS

SEQ ID NO: 3420 - protein, 117 aa, synthetic construct
LQLVESGGGLVQPGGSLRLSCAASGFTLDYYAIGWSRQAPGKEREGVSYISSSGGSTNYADGVKGRFTVSRDNAKNTVYLQMNSLKPEDTGVYSCAAAGGYGNSSRYWGQGTSVTVS

SEQ ID NO: 3421 - protein, 117 aa, synthetic construct
LQLVESGGGLVQPGGSLRLSCAASGFTLDYYAIGWSRQAPGKEREGVSYISSSGGSTNYADSVKGRFTISRDNAKNTVYLQMNSLKPEDTGVYSCAAAGGYRNSSRYWGQGTSVTVS

SEQ ID NO: 3422 - protein, 117 aa, synthetic construct
LQLVESGGGLVQPGGSLRLSCAASGFTLDYYAIGWSRQAPGKEREGVSYISSSGGSTNYADSVKGRFTISRDNAKNTVYLQMNSLKPEDTGVYYCAAAGGYGNSSRYWGQGTSVTVS

SEQ ID NO: 3423 - protein, 117 aa, synthetic construct
LQLVESGGGLVQPGGSLRLSCAASGFTLDYYAIGWSRQAPGKEREGVSYISSSGGSTNYADSVKGRFTISRDNAKNTVYLQMNSLKPEDTGVYYCAAAGGYRNSSRYWGQGTSVTVS

SEQ ID NO: 3424 - protein, 117 aa, synthetic construct
LQLVESGGGLVQPGGSLRLSCAASGFTLDYYAIGWSRQAPGKEREGVSYISSSGGSTNYADSVKGRFTVSRDNAKNTVYLQMNSLKPEDTGVYSCAAAGGYGNSSRYWGQGTSVTVS

SEQ ID NO: 3425 - protein, 117 aa, synthetic construct
LQLVESGGGLVQPGGSLRLSCAASGFTLDYYAIGWSRQAPGKEREGVSYISSSGGSTNYADSVKGRFTVSRDNAKNTVYLQMNSLKPEDTGVYSCAAAGGYRNSSRYWGQGTSVTVS

SEQ ID NO: 3426 - protein, 117 aa, synthetic construct
LQLVESGGGLVQPGGSLRLSCAASGFTLDYYAVGWFRQAPGKEREGVSYISSSGGSTNYADSVKGRFTVSRDNAKNTVYLQMNSLKPEDTGVYSCAAAGGYGNSSRYWGQGTSVTVS

SEQ ID NO: 3427 - protein, 117 aa, synthetic construct
LQLVESGGGLVQPGGSLRLSCAASGFTPDYYAIGWFRQAPGKEREGVSYISSSGGSTNYADSVKGRFTISRDNAKNTVYLQMHSLKPEDTAVYSCAAAGGYGNSSRYWGQGTSVTVS

SEQ ID NO: 3428 - protein, 117 aa, synthetic construct
LQLVESGGGLVQPGGSLRLSCAASGVTLDSYAIGWFRQAPGKEREGVSYISSSGGSTNYADSVKGRFTISRDNAKNTVYLQMNSLKPEDTGVYSCAAAGGYGNSSRYWGQGTSVTVS

SEQ ID NO: 3429 - protein, 117 aa, synthetic construct
LQLVESGGGLVQPGGSLRLSCAASGVTLDYFAIGWFRQAPGKEREGVSYISSSGGSTNYADSVKGRFTISRDNAKNTVYLQMNSLKPEDTGVYSCAAAGGYGNSSRYWGQGTSVTVS

SEQ ID NO: 3430 - protein, 117 aa, synthetic construct
LQLVESGGGLVQPGGSLRLSCAASGVTLDYYAIGWFRQAPGKEREGVSYISSSGGSTNYADSVKGRFTISRDNAKNTVYLQMNSLKPEDTAVYSCAAAGGYGNSSRYWGQGTSVTVS

SEQ ID NO: 3431 - protein, 117 aa, synthetic construct
LQLVESGGGLVQPGGSLRLSCAASGVTLDYYAIGWFRQAPGKEREGVSYISSSGGSTNYADSVKGRFTISRDNAKNTVYLQMNSLKPEDTAVYSCAAAGGYRNSSRYWGQGTSVTVS

SEQ ID NO: 3432 - protein, 117 aa, synthetic construct
LQLVESGGGLVQPGGSLRLSCAASGVTLDYYAIGWFRQAPGKEREGVSYISSSGGSTNYADSVKGRFTISRDNAKNTVYLQMNSLKPEDTGVYSCAAAGGYRNSSRYWGQGTSVTVS

SEQ ID NO: 3433 - protein, 117 aa, synthetic construct
LQLVESGGGLVQPGGSLRLSCAASGVTLDYYAIGWFRQAPGKEREGVSYISSSGGSTNYADSVKGRFTVSRDNAKNTVYLQMNSLKPEDTGVYSCAAAGGYGNSSRYWGQGTSVTVS

SEQ ID NO: 3434 - protein, 117 aa, synthetic construct
LQLVESGGGLVQPGGSLRLSCAASGVTLDYYAIGWFRQAPGKEREGVSYISSSGGSTNYADTVKGRFTISRDNAKNTVYLQMNSLKPEDTGVYSCAAAGGYGNSSRYWGQGTSVTVS

SEQ ID NO: 3435 - protein, 117 aa, synthetic construct
LQLVESGGGLVQPGGYLRLSCAASGFTLDYYAIGWFRQAPGKEREGVSYISSSGGSTNYADSVKGRFTVSRDNAKNTVYLQMNSLKPEDTGVYSCAAAGGYGNSSRYWGQVTSVTVS

SEQ ID NO: 3436 - protein, 115 aa, synthetic construct
LVESGGGLVQPGGSLRLSCAASGFTLDYYAIGWFRQAPGKEREGVSYISSSGGSTNYADSVKGRFTISRDNAKNTVYLQMNSLKPEDTAVYSCAAAGGYGNSSRYWGQGTSVTVS

SEQ ID NO: 3437 - protein, 116 aa, synthetic construct
QLVESGGGLVQPGGSLRLSCAASGFSLDYYAIGWFRQAPGKEREGVSYISSSGGSTNYADSVKGRFTISRDNAKNTVYLQMNSLKPEDTAVYSCAAAGGYGNSSRYWGQGTSVTVS

SEQ ID NO: 3438 - protein, 116 aa, synthetic construct
QLVESGGGLVQPGGSLRLSCAASGFSLDYYAIGWFRQAPGKEREGVSYISSSGGSTNYADSVKGRFTISRDNAKNTVYLQMNSLKPEDTGVYSCAAAGGYRNSSRYWGQGTSVTVS

SEQ ID NO: 3439 - protein, 116 aa, synthetic construct
QLVESGGGLVQPGGSLRLSCAASGFSLDYYAIGWFRQAPGKEREGVSYISSSGGSTNYADSVKGRFTVSRDNAKNTVYLQMNSLKPEDTGVYSCAAAGGYGNSSRYWGQGTSVTVS

SEQ ID NO: 3440 - protein, 116 aa, synthetic construct
QLVESGGGLVQPGGSLRLSCAASGFSLDYYAIGWFRQAPGKEREGVSYISSSGGSTNYADSVKGRFTVSRDNAKNTVYLQMNSLKPEDTGVYSCAAAGGYRNSSRYWGQGTSVTVS

SEQ ID NO: 3441 - protein, 114 aa, synthetic construct
VESGGGLVQPGGSLRLSCAASGFTLDYYAIGWFRQAPGKEREGVSYISSSGGSTNYADSVKGRFTVSRDNAKNTVYLQMNSLKPEDTGVYSCAAAGGYGNSSRYWGQGTSVTVS

SEQ ID NO: 3442 - protein, 117 aa, synthetic construct
VQLVESGGGLVQPGGSLRLSCAASGFTLDYYAIGWFRQAPGKEREGVSYISSSGGSTNYADSVKGRFTISRDNAKNTVYLQMNSLKPEDTAVYSCAAAGGYGNSSRYWGQGTSVTVS

SEQ ID NO: 3443 - protein, 117 aa, synthetic construct
VQLVESGGGLVQPGGSLRLSCAASGFTLDYYAIGWFRQAPGKEREGVSYISSSGGSTNYADSVKGRFTISRDNAKNTVYLQMNSLKPEDTGVYSCAAAGGYRNSSRYWGQGTSVTVS

SEQ ID NO: 3444 - protein, 117 aa, synthetic construct
VQLVESGGGLVQPGGSLRLSCAASGFTLDYYAIGWFRQAPGKEREGVSYISSSGGSTNYADSVKGRFTVSRDNAKNTVYLQMNSLKPEDTGVYSCAAAGGYGNSSRYWGQGTSVTVS

SEQ ID NO: 3445 - protein, 8 aa, synthetic construct
GFTLDFYA

SEQ ID NO: 3446 - protein, 8 aa, synthetic construct
GFTLDHYA

SEQ ID NO: 3447 - protein, 8 aa, synthetic construct
GFTPDYYA

SEQ ID NO: 3448 - protein, 8 aa, synthetic construct
GVTLDSYA

SEQ ID NO: 3449 - protein, 8 aa, synthetic construct
GVTLDYFA

SEQ ID NO: 3450 - protein, 8 aa, synthetic construct
IRSSGGST

SEQ ID NO: 3451 - protein, 12 aa, synthetic construct
AAAGGYRNSPRY

SEQ ID NO: 3452 - protein, 12 aa, synthetic construct
AAAVGYGNSSRY

SEQ ID NO: 3453 - protein, 12 aa, synthetic construct
AAAGGYCNSSRY

SEQ ID NO: 3454 - protein, 12 aa, synthetic construct
AAAGGYDNSSRY

SEQ ID NO: 3455 - protein, 12 aa, synthetic construct
AAAGGYSNSSRY

SEQ ID NO: 3456 - protein, 12 aa, synthetic construct
AAAGGYTNSSRH

SEQ ID NO: 3457 - protein, 10 aa, synthetic construct
AAAGGYVMDY

SEQ ID NO: 3458 - protein, 12 aa, synthetic construct
AAAGGYGNCSRY

SEQ ID NO: 3459 - protein, 12 aa, synthetic construct
AAAGGYGNSTRY

SEQ ID NO: 3460 - protein, 120 aa, synthetic construct
LQLVESGGGLVQPGGSLRLSCAASGFTLDFYAIGWFRQAPGKEREGVSSISSSGGSTNYADSVKGRFTVSRDNAKHTVYLQMNSLKPEDTAVYYCAADGDYRYPKGPMDYWGQGTSVTVS

SEQ ID NO: 3461 - protein, 120 aa, synthetic construct
LQLVESGGGLVQPGGSLRLSCAASGFTLDNYAIGWFRQAPGKEREGVSCISRSGGSTIYADSVKGRFTISRDNAKNTVYLQMNSLKPEDTAVYYCAADGDYRYPKGPMDYWGQGTSVTVS

SEQ ID NO: 3462 - protein, 120 aa, synthetic construct
LQLVESGGGLVQPGGSLRLSCAASGFTLDNYAIGWFRQAPGKEREGVSCISRSGGSTIYADSVKGRFTISRDYAKNTVYLQMNSLKPEDTAVYYCAADGDYRYPKGPMDYWGQGTSVTVS

SEQ ID NO: 3463 - protein, 120 aa, synthetic construct
LQLVESGGGLVQPGGSLRLSCAASGFTLDNYAIGWFRQAPGKEREGVSCISRSGGSTTYADSVKGRFTISRDYAKNTVYLQMDSLKPEDTAVYYCAADGDYRYPKGPMDYWGQGTSVTVS

SEQ ID NO: 3464 - protein, 121 aa, synthetic construct
LQLVESGGGLVQPGGSLRLSCAASGFTLDNYAIGWFRQAPGKEREGVSCISSSGGSTHYADSVKGRFTISRDNAKNTVYLQMNSLKPEDTAVYYCAAGDPSGNYEWGAMDYWGQGTSVTVS

SEQ ID NO: 3465 - protein, 120 aa, synthetic construct
LQLVESGGGLVQPGGSLRLSCAASGFTLDNYAIGWFRQAPGKEREGVSSISRSGGSTTYADSVKGRFTISRDYAKNTVYLQMDSLKPEDTAVYYCAADGDYRYPKGPMDYWGQGTSVTVS

SEQ ID NO: 3466 - protein, 120 aa, synthetic construct
LQLVESGGGLVQPGGSLRLSCAASGFTLDNYAIGWFRQAPGKEREGVSSISRSGGSTTYADSVKGRFTVSRDNAKHTVYLQMNSLKPEDTAVYYCAADGDYRYPKGPMDYWGQGTSVTVS

SEQ ID NO: 3467 - protein, 120 aa, synthetic construct
LQLVESGGGLVQPGGSLRLSCAASGFTLDNYAIGWFRQAPGKEREGVSSISSSGGSTNYADSVKGRFTISKGNARNTLYLQMNSLKPEDTAVYFCAASPRQLGPYYAMDYWGQGTSVTVS

SEQ ID NO: 3468 - protein, 121 aa, synthetic construct
LQLVESGGGLVQPGGSLRLSCAASGFTLDNYAIGWFRQAPGKEREGVSSISSSGGSTNYADSVKGRFTISRDNAKNTVYLQMNSLKPEDTAVYFCAAGDPSSNYEWGAMDYWGHGTSVTVS

SEQ ID NO: 3469 - protein, 120 aa, synthetic construct
LQLVESGGGLVQPGGSLRLSCAASGFTLDNYAIGWFRQAPGKEREGVSSISSSGGSTNYADSVKGRFTISRDNAKNTVYLQMNSLKPEDTAVYYCAADGDYRYPKGPMDYWGQGTSVTVS

SEQ ID NO: 3470 - protein, 120 aa, synthetic construct
LQLVESGGGLVQPGGSLRLSCAASGFTLDNYAIGWFRQAPGKEREGVSSISSSGGSTNYADSVKGRFTISRDYAKNTVYLQMDSLKPEDTAVYYCAADGDYRYPKGPMDYWGQGTSVTVS

SEQ ID NO: 3471 - protein, 120 aa, synthetic construct
LQLVESGGGLVQPGGSLRLSCAASGFTLDNYAIGWFRQAPGKEREGVSSISSSGGSTNYADSVKGRFTISRDYAKNTVYLQMNSLKPEDTAVYYCAADGDYRYPKGPMDYWGQGTSVTVS

SEQ ID NO: 3472 - protein, 120 aa, synthetic construct
LQLVESGGGLVQPGGSLRLSCAASGFTLDNYAIGWFRQAPGKEREGVSSISSSGGSTNYADSVKGRFTVSRDNAKHTVYLQMDSLKPEDTAGYYCAADGDYRYPKGPMDYWGQGTSVTVS

SEQ ID NO: 3473 - protein, 120 aa, synthetic construct
LQLVESGGGLVQPGGSLRLSCAASGFTLDNYAIGWFRQAPGKEREGVSSISSSGGSTNYADSVKGRFTVSRDNAKHTVYLQMDSLKPEDTAVYYCAADGDYRYPKGPMDYWGQGTSVTVS

SEQ ID NO: 3474 - protein, 120 aa, synthetic construct
LQLVESGGGLVQPGGSLRLSCAASGFTLDNYAIGWFRQAPGKEREGVSSISSSGGSTNYADSVKGRFTVSRDNAKHTVYLQMNSLKPEDTAVYFCAADGHYRYPKGPMDYWGQGTSVTVS

SEQ ID NO: 3475 - protein, 121 aa, synthetic construct
LQLVESGGGLVQPGGSLRLSCAASGFTLDNYAIGWFRQAPGKEREGVSSISSSGGSTNYADSVKGRFTVSRDNAKHTVYLQMNSLKPEDTAVYFCAAGDPSSNYEWGAMDYWGHGTSVTVS

SEQ ID NO: 3476 - protein, 121 aa, synthetic construct
LQLVESGGGLVQPGGSLRLSCAASGFTLDNYAIGWFRQAPGKEREGVSSISSSGGSTNYADSVKGRFTVSRDNAKHTVYLQMNSLKPEDTAVYFCAAGDPSSNYEWGAMDYWGQGTSVTVS

SEQ ID NO: 3477 - protein, 120 aa, synthetic construct
LQLVESGGGLVQPGGSLRLSCAASGFTLDNYAIGWFRQAPGKEREGVSSISSSGGSTNYADSVKGRFTVSRDNAKHTVYLQMNSLKPEDTAVYYCAADGDYRYPKGPMDYWGQGTSVTVS

SEQ ID NO: 3478 - protein, 120 aa, synthetic construct
LQLVESGGGLVQPGGSLRLSCAASGFTLDNYAIGWFRQAPGKEREGVSSISSSGGSTNYADSVKGRFTVSRDNAKHTVYLQMNSLKPEDTAVYYCAADGHYRYPKGPMDYWGQGTSVTVS

SEQ ID NO: 3479 - protein, 121 aa, synthetic construct
LQLVESGGGLVQPGGSLRLSCAASGFTLDNYAIGWFRQAPGKEREGVSSISSSGGSTNYADSVKGRFTVSRDNAKHTVYLQMNSLKPEDTAVYYCAAGDPSGNYEWGAMDYWGHGTSVTVS

SEQ ID NO: 3480 - protein, 121 aa, synthetic construct
LQLVESGGGLVQPGGSLRLSCAASGFTLDNYAIGWFRQAPGKEREGVSSISSSGGSTNYADSVKGRFTVSRDNAKHTVYLQMNSLKPEDTAVYYCAAGDPSGNYEWGAMDYWGQGTSVTVS

SEQ ID NO: 3481 - protein, 121 aa, synthetic construct
LQLVESGGGLVQPGGSLRLSCAASGFTLDNYAIGWFRQAPGKEREGVSSISSSGGSTNYADSVKGRFTVSRDNAKHTVYLQMNSLKPEDTAVYYCAAGDPSSNYEWGAMDYWGHGTSVTVS

SEQ ID NO: 3482 - protein, 120 aa, synthetic construct
LQLVESGGGLVQPGGSLRLSCAASGFTLDNYAIGWFRQAPGKEREGVSSISSSGGSTNYADSVKGRFTVSRDNAKHTVYLQMNSLKPEDTAVYYCAGVGDYRYPKGPMDYWGQGTSVTVS

SEQ ID NO: 3483 - protein, 120 aa, synthetic construct
LQLVESGGGLVQPGGSLRLSCAASGFTLDNYAIGWFRQAPGKEREGVSSISSSGGSTNYADSVKGRFTVSRDNAKNTVYLQMDSLKPEDTAVYYCAADGDYRYPKGPMDYWGQGTSVTVS

SEQ ID NO: 3484 - protein, 120 aa, synthetic construct
LQLVESGGGLVQPGGSLRLSCAASGFTLDNYAIGWFRQAPGKEREGVSSISSSGGSTNYADSVKGRFTVSRDNAKNTVYLQMNSLKPEDTAVYFCAADGHYRYPKGPMDYWGQGTSVTVS

SEQ ID NO: 3485 - protein, 121 aa, synthetic construct
LQLVESGGGLVQPGGSLRLSCAASGFTLDNYAIGWFRQAPGKEREGVSSISSSGGSTNYADSVKGRFTVSRDNAKNTVYLQMNSLKPEDTAVYFCAAGDPSSNYEWGAMDYWGHGTSVTVS

SEQ ID NO: 3486 - protein, 120 aa, synthetic construct
LQLVESGGGLVQPGGSLRLSCAASGFTLDNYAIGWFRQAPGKEREGVSSISSSGGSTNYADSVKGRFTVSRDNAKNTVYLQMNSLKPEDTAVYYCAADGDYRYPKGPMDYWGQGTSVTVS

SEQ ID NO: 3487 - protein, 120 aa, synthetic construct
LQLVESGGGLVQPGGSLRLSCAASGFTLDNYAIGWFRQAPGKEREGVSSISSSGGSTNYADSVKGRFTVSRDNAKQTVYLQMNSLKPEDTAVYFCAADGHYRYPKGPMDYWGQGTSVTVS

SEQ ID NO: 3488 - protein, 121 aa, synthetic construct
LQLVESGGGLVQPGGSLRLSCAASGFTLDNYAIGWFRQAPGKEREGVSSISSSGGSTNYADSVKGRFTVSRDNAKQTVYLQMNSLKPEDTAVYFCAAGDPSSNYEWGAMDYWGHGTSVTVS

SEQ ID NO: 3489 - protein, 120 aa, synthetic construct
LQLVESGGGLVQPGGSLRLSCAASGFTLDNYAIGWFRQAPGKEREGVSSISSSGGSTNYADSVKGRFTVSRDNAKQTVYLQMNSLKPEDTAVYYCAADGDYRYPKGPMDYWGQGTSVTVS

SEQ ID NO: 3490 - protein, 120 aa, synthetic construct
LQLVESGGGLVQPGGSLRLSCAASGFTLDNYAIGWFRQAPGKEREGVSSISSSGGSTNYADSVKGRFTVSRDNAKQTVYLQMNSLKPEDTAVYYCAADGHYRYPKGPMDYWGQGTSVTVS

SEQ ID NO: 3491 - protein, 120 aa, synthetic construct
LQLVESGGGLVQPGGSLRLSCAASGFTLDNYAIGWFRQAPGKEREGVSSISSSGGSTNYADSVKGRFTVSRDYAKNTVYLQMDSLKPEDTAVYYCAADGDYRYPKGPMDYWGQGTSVTVS

SEQ ID NO: 3492 - protein, 120 aa, synthetic construct
LQLVESGGGLVQPGGSLRLSCAASGFTLDNYAIGWFRQAPGKEREGVSSISSSGGSTNYADSVKGRFTVSRDYAKNTVYLQMNSLKPEDTAVYYCAADGDYRYPKGPMDYWGQGTSVTVS

SEQ ID NO: 3493 - protein, 120 aa, synthetic construct
LQLVESGGGLVQPGGSLRLSCAASGFTLDNYAIGWFRQAPGKEREGVSSISSSGGSTTYADSVKGRFTISRDYAKNTVYLQMDSLKPEDTAVYYCAADGDYRYPKGPMDYWGQGTSVTVS

SEQ ID NO: 3494 - protein, 120 aa, synthetic construct
LQLVESGGGLVQPGGSLRLSCAASGFTLDSYAIGWFRQAPGKEREGVSCISRSGGSTIYADSVKGRFTISRDNAKNTVYLQMNSLKPEDTAVYYCAADGDYRYPKGPMDYWGQGTSVTVS

SEQ ID NO: 3495 - protein, 120 aa, synthetic construct
LQLVESGGGLVQPGGSLRLSCAASGFTLDSYAIGWFRQAPGKEREGVSCISRSGGSTTYADSVKGRFTISRDYAKNTVYLQMDSLKPEDTAVYYCAADGDYRYPKGPMDYWGQGTSVTVS

SEQ ID NO: 3496 - protein, 120 aa, synthetic construct
LQLVESGGGLVQPGGSLRLSCAASGFTLDSYAIGWFRQAPGKEREGVSCISSSGRSTIYADSVKGRFSISRDNAKNTVYLQMNSLKPEDTAVYFCAADGHYRYPKGPMDYWGQGTSVTVS

SEQ ID NO: 3497 - protein, 120 aa, synthetic construct
LQLVESGGGLVQPGGSLRLSCAASGFTLDSYAIGWFRQAPGKEREGVSSISSSGGSTNYADSVKGRFTVSRDNAKHTVYLQMNSLKPEDTAVYYCAADGDYRYPKGPMDYWGQGTSVTVS

SEQ ID NO: 3498 - protein, 117 aa, synthetic construct
LQLVESGGGLVQPGGSLRLSCAASGFTLDSYAIGWFRQAPGKEREGVSYISSSGGSTNYADSVKGRFTISRDNAKNTVYLQMNSLKPEDTAVYYCAAYYRCLYAMDYWGQGTSVTVS

SEQ ID NO: 3499 - protein, 117 aa, synthetic construct
LQLVESGGGLVQPGGSLRLSCAASGFTLDYFAIGWFRQAPGKEREGVSYISSSGGSTNYADSVKGRFTISRDNAKNTVYLQMNSLKPEDTAVYYCAAYYRCLYAMDYWGQGTSVTVS

SEQ ID NO: 3500 - protein, 121 aa, synthetic construct
LQLVESGGGLVQPGGSLRLSCAASGFTLDYYAIGWFRQAPGKEREGVSCISSSGGSTHYADSVKGRFTISRDNAKNTVYLQMNSLKPEDTAVYYCAAGDPSGNYEWGAMDYWGQGTSVTVS

SEQ ID NO: 3501 - protein, 117 aa, synthetic construct
LQLVESGGGLVQPGGSLRLSCAASGFTLDYYAIGWFRQAPGKEREGVSCISSSGGSTNYADSVKGRFTISRDNAKNTVYLQMNSLKPEDTAVYYCAAYYRCLYAMDYWGQGTSVTVS

SEQ ID NO: 3502 - protein, 117 aa, synthetic construct
LQLVESGGGLVQPGGSLRLSCAASGFTLDYYAIGWFRQAPGKEREGVSYISSSGGSTNYADGVKGRFTISRDNAKNTVYLQMNSLKPEDTAVYYCAAYYRCLYAMDYWGQGTSVTVS

SEQ ID NO: 3503 - protein, 117 aa, synthetic construct
LQLVESGGGLVQPGGSLRLSCAASGFTLDYYAIGWFRQAPGKEREGVSYISSSGGSTNYADSVKGRFTISRDNAKNTVFLQMNSLKPEDTGVYYCAAYYRCLYAMDYWGQGTSVTVS

SEQ ID NO: 3504 - protein, 117 aa, synthetic construct
LQLVESGGGLVQPGGSLRLSCAASGFTLDYYAIGWFRQAPGKEREGVSYISSSGGSTNYADSVKGRFTISRDNAKNTVYLQMHNLKPEDTAVYYCAAYYRCLYAMDYWGQGTSVTVS

SEQ ID NO: 3505 - protein, 117 aa, synthetic construct
LQLVESGGGLVQPGGSLRLSCAASGFTLDYYAIGWFRQAPGKEREGVSYISSSGGSTNYADSVKGRFTISRDNAKNTVYLQMHSLKPEDTAVYYCAAYYRCLYAMDYWGQGTSVTVS

SEQ ID NO: 3506 - protein, 117 aa, synthetic construct
LQLVESGGGLVQPGGSLRLSCAASGFTLDYYAIGWFRQAPGKEREGVSYISSSGGSTNYADSVKGRFTISRDNAKNTVYLQMNSLKPEDSAVYYCAAYYRCLYAMDYWGQGTSVTVS

SEQ ID NO: 3507 - protein, 119 aa, synthetic construct
LQLVESGGGLVQPGGSLRLSCAASGFTLDYYAIGWFRQAPGKEREGVSYISSSGGSTNYADSVKGRFTISRDNAKNTVYLQMNSLKPEDTAMYSCKAYGYDENYFPMDYWGQGTSVTVS

SEQ ID NO: 3508 - protein, 119 aa, synthetic construct
LQLVESGGGLVQPGGSLRLSCAASGFTLDYYAIGWFRQAPGKEREGVSYISSSGGSTNYADSVKGRFTISRDNAKNTVYLQMNSLKPEDTAMYSCKAYGYDENYYAMDYWGQGTSVTVS

SEQ ID NO: 3509 - protein, 119 aa, synthetic construct
LQLVESGGGLVQPGGSLRLSCAASGFTLDYYAIGWFRQAPGKEREGVSYISSSGGSTNYADSVKGRFTISRDNAKNTVYLQMNSLKPEDTAVYSCKAYGYDENYYAMDYWGQGTSVTVS

SEQ ID NO: 3510 - protein, 117 aa, synthetic construct
LQLVESGGGLVQPGGSLRLSCAASGFTLDYYAIGWFRQAPGKEREGVSYISSSGGSTNYADSVKGRFTISRDNAKNTVYLQMNSLKPEDTAVYYCAAYYRCLYAMDYWGQGTSVTVS

SEQ ID NO: 3511 - protein, 117 aa, synthetic construct
LQLVESGGGLVQPGGSLRLSCAASGFTLDYYAIGWFRQAPGKEREGVSYISSSGGSTNYADSVKGRFTISRDNAKNTVYLQMNSLKPEDTGVYSCAAYYRCLYAMDYWGQGTSVTVS

SEQ ID NO: 3512 - protein, 117 aa, synthetic construct
LQLVESGGGLVQPGGSLRLSCAASGFTLDYYAIGWFRQAPGKEREGVSYISSSGGSTNYADSVKGRFTISRDNAKNTVYLQMNSLKPEDTGVYYCAAYYRCLYAMDYWGQGTSVTVS

SEQ ID NO: 3513 - protein, 117 aa, synthetic construct
LQLVESGGGLVQPGGSLRLSCAASGFTLDYYAIGWFRQAPGKEREGVSYISSSGGSTNYADSVKGRFTVSRDNAKNTVYLQMNSLKPEDSAVYYCAAYYRCLYAMDYWGQGTSVTVS

SEQ ID NO: 3514 - protein, 117 aa, synthetic construct
LQLVESGGGLVQPGGSLRLSCAASGFTLDYYAIGWFRQAPGKEREGVSYISSSGGSTNYADSVKGRFTVSRDNAKNTVYLQMNSLKPEDTAVYYCAAYYRCLYAMDYWGQGTSVTVS

SEQ ID NO: 3515 - protein, 117 aa, synthetic construct
LQLVESGGGLVQPGGSLRLSCAASGFTLDYYAIGWFRQAPGKEREGVSYISSSGGSTNYADSVKGRFTVSRDNAKNTVYLQMNSLKPEDTGVYYCAAYYRCLYAMDYWGQGTSVTVS

SEQ ID NO: 3516 - protein, 117 aa, synthetic construct
LQLVESGGGLVQPGGSLRLSCAASGFTLDYYAIGWFRQAPGKEREGVSYISSSGGSTNYAESVKGRFTISRDNAKNTVYLQMNSLKPEDTAVYYCAAYYRCLYAMDYWGQGTSVTVS

SEQ ID NO: 3517 - protein, 117 aa, synthetic construct
LQLVESGGGLVQPGGSLRLSCAASGFTLDYYAIGWSRQAPGKEREGVSCISSSGGSTNYADSVKGRFTISRDNAKNTVYLQMNSLKPEDTAVYYCAAYYRCLYAMDYWGQGTSVTVS

SEQ ID NO: 3518 - protein, 120 aa, synthetic construct
LQLVESGGGLVQPGGSLRLSCAASGFTLNYYAIGWFRQAPGKEREGVSCISRSGGSTIYADSVKGRFTISRDNAKNTVYLQMNSLKPEDTAVYYCAADGHYRYPKGPMDYWGQGTSVTVS

SEQ ID NO: 3519 - protein, 120 aa, synthetic construct
LQLVESGGGLVQPGGSLRLSCAASGFTLNYYAIGWFRQAPGKEREGVSCISRSGGSTIYADSVKGRFTISRDYAKNTVYLQMNSLKPEDTAVYYCAADGDYRYPKGPMDYWGQGTSVTVS

SEQ ID NO: 3520 - protein, 120 aa, synthetic construct
LQLVESGGGLVQPGGSLRLSCAASGFTLNYYAIGWFRQAPGKEREGVSCISRSGGSTTYADSVKGRFTISRDYAKNTVYLQMDSLKPEDTAVYYCAADGDYRYPKGPMDYWGQGTSVTVS

SEQ ID NO: 3521 - protein, 120 aa, synthetic construct
LQLVESGGGLVQPGGSLRLTCAASGFTLDNYAIGWFRQAPGKEREGVSCISRSGGSTIYADSVKGRFTISRDNAKNTVYLQMNSLKPEDTAVYYCAADGDYRYPKGPMDYWGQGTSVTVS

SEQ ID NO: 3522 - protein, 120 aa, synthetic construct
LQLVESGGGLVQPGGSLRLTCAASGFTLDNYAIGWFRQAPGKEREGVSCISRSGGSTIYADSVKGRFTISRDYAKNTVYLQMNSLKPEDTAVYYCAADGDYRYPKGPMDYWGQGTSVTVS

SEQ ID NO: 3523 - protein, 120 aa, synthetic construct
LQLVESGGGLVQPGGSLRLTCAASGFTLDNYAIGWFRQAPGKEREGVSCISRSGGSTTYADSVKGRFTISRDYAKNTVYLQMDSLKPEDTAVYYCAADGDYRYPKGPMDYWGQGTSVTVS

SEQ ID NO: 3524 - protein, 120 aa, synthetic construct
LQLVESGGGLVQPGGSLRLTCAASGFTLDNYAIGWFRQAPGKEREGVSSISSSGGSTNYADSVKGRFTISKGNARNTLYLQMNSLKPEDTAVYFCAASPRQLGPYYAMDYWGQGTSVTVS

SEQ ID NO: 3525 - protein, 120 aa, synthetic construct
LQLVESGGGLVQPGGSLRLTCAASGFTLDNYAIGWFRQAPGKEREGVSSISSSGGSTNYADSVKGRFTISRDYAKNTVYLQMDSLKPEDTAVYYCAADGDYRYPKGPMDYWGQGTSVTVS

SEQ ID NO: 3526 - protein, 120 aa, synthetic construct
LQLVESGGGLVQPGGSLRLTCAASGFTLDNYAIGWFRQAPGKEREGVSSISSSGGSTNYADSVKGRFTISRDYAKNTVYLQMNSLKPEDTAVYYCAADGDYRYPKGPMDYWGQGTSVTVS

SEQ ID NO: 3527 - protein, 120 aa, synthetic construct
LQLVESGGGLVQPGGSLRLTCAASGFTLDNYAIGWFRQAPGKEREGVSSISSSGGSTNYADSVKGRFTVSRDNAKHTVYLQMDSLKPEDTAVYYCAADGDYRYPKGPMDYWGQGTSVTVS

SEQ ID NO: 3528 - protein, 121 aa, synthetic construct
LQLVESGGGLVQPGGSLRLTCAASGFTLDNYAIGWFRQAPGKEREGVSSISSSGGSTNYADSVKGRFTVSRDNAKHTVYLQMNSLKPEDTAVYFCAAGDPSSNYEWGAMDYWGHGTSVTVS

SEQ ID NO: 3529 - protein, 120 aa, synthetic construct
LQLVESGGGLVQPGGSLRLTCAASGFTLDNYAIGWFRQAPGKEREGVSSISSSGGSTNYADSVKGRFTVSRDNAKHTVYLQMNSLKPEDTAVYYCAADGDYRYPKGPMDYWGQGTSVTVS

SEQ ID NO: 3530 - protein, 120 aa, synthetic construct
LQLVESGGGLVQPGGSLRLTCAASGFTLDNYAIGWFRQAPGKEREGVSSISSSGGSTNYADSVKGRFTVSRDNAKHTVYLQMNSLKPEDTAVYYCAGVGDYRYPKGPMDYWGQGTSVTVS

SEQ ID NO: 3531 - protein, 120 aa, synthetic construct
LQLVESGGGLVQPGGSLRLTCAASGFTLDNYAIGWFRQAPGKEREGVSSISSSGGSTNYADSVKGRFTVSRDNAKNTVYLQMDSLKPEDTAVYYCAADGDYRYPKGPMDYWGQGTSVTVS

SEQ ID NO: 3532 - protein, 121 aa, synthetic construct
LQLVESGGGLVQPGGSLRLTCAASGFTLDNYAIGWFRQAPGKEREGVSSISSSGGSTNYADSVKGRFTVSRDNAKNTVYLQMNSLKPEDTAVYFCAAGDPSSNYEWGAMDYWGHGTSVTVS

SEQ ID NO: 3533 - protein, 120 aa, synthetic construct
LQLVESGGGLVQPGGSLRLTCAASGFTLDNYAIGWFRQAPGKEREGVSSISSSGGSTNYADSVKGRFTVSRDNAKNTVYLQMNSLKPEDTAVYYCAADGDYRYPKGPMDYWGQGTSVTVS

SEQ ID NO: 3534 - protein, 121 aa, synthetic construct
LQLVESGGGLVQPGGSLRLTCAASGFTLDNYAIGWFRQAPGKEREGVSSISSSGGSTNYADSVKGRFTVSRDNAKQTVYLQMNSLKPEDTAVYFCAAGDPSSNYEWGAMDYWGHGTSVTVS

SEQ ID NO: 3535 - protein, 120 aa, synthetic construct
LQLVESGGGLVQPGGSLRLTCAASGFTLDNYAIGWFRQAPGKEREGVSSISSSGGSTNYADSVKGRFTVSRDNAKQTVYLQMNSLKPEDTAVYYCAADGDYRYPKGPMDYWGQGTSVTVS

SEQ ID NO: 3536 - protein, 120 aa, synthetic construct
LQLVESGGGLVQPGGSLRLTCAASGFTLDNYAIGWFRQAPGKEREGVSSISSSGGSTNYADSVKGRFTVSRDNAKQTVYLQMNSLKPEDTAVYYCAADGHYRYPKGPMDYWGQGTSVTVS

SEQ ID NO: 3537 - protein, 120 aa, synthetic construct
LQLVESGGGLVQPGGSLRLTCAASGFTLDNYAIGWFRQAPGKEREGVSSISSSGGSTNYADSVKGRFTVSRDYAKNTVYLQMDSLKPEDTAVYYCAADGDYRYPKGPMDYWGQGTSVTVS

SEQ ID NO: 3538 - protein, 120 aa, synthetic construct
LQLVESGGGLVQPGGSLRLTCAASGFTLNYYAIGWFRQAPGKEREGVSCISRSGGSTIYADSVKGRFTISRDNAKNTVYLQMNSLKPEDTAVYYCAADGDYRYPKGPMDYWGQGTSVTVS

SEQ ID NO: 3539 - protein, 120 aa, synthetic construct
LQLVESGGGLVQPGGSLRLTCAASGFTLNYYAIGWFRQAPGKEREGVSCISRSGGSTIYADSVKGRFTISRDYAKNTVYLQMNSLKPEDTAVYYCAADGDYRYPKGPMDYWGQGTSVTVS

SEQ ID NO: 3540 - protein, 120 aa, synthetic construct
LQLVESGGGLVQPGGSLRLTCAASGFTLNYYAIGWFRQAPGKEREGVSCISRSGGSTTYADSVKGRFTISRDYAKNTVYLQMDSLKPEDTAVYYCAADGDYRYPKGPMDYWGQGTSVTVS

SEQ ID NO: 3541 - protein, 120 aa, synthetic construct
LQLVESGGGLVQPGGSLRLTCAASGFTLNYYAIGWFRQAPGKEREGVSSISSSGGSTNYADSVKGRFTVSRDNAKHTVYLQMNSLKPEDTAVYYCAADGDYRYPKGPMDYWGQGTSVTVS

SEQ ID NO: 3542 - protein, 120 aa, synthetic construct
LQLVESGGGLVQPGGSLRLTCAASGFTLNYYAIGWFRQAPGKEREGVSSISSSGGSTNYADSVKGRFTVSRDNAKNTVYLQMNSLKPEDTAVYYCAADGDYRYPKGPMDYWGQGTSVTVS

SEQ ID NO: 3543 - protein, 119 aa, synthetic construct
LVESGGGLVQPGGSLRLSCAASGFTLDFYAIGWFRQAPGKEREGVSCISRSGDSTHYADSVKGRFTISRDNAKNTVYLQMNSLKPEDTAVYFCAAGDPSSNYEWGAMDYWGHGTSVTVS

SEQ ID NO: 3544 - protein, 119 aa, synthetic construct
LVESGGGLVQPGGSLRLSCAASGFTLDNYAIGWFRQAPGKEREGVSCISRSGDSTHYADSVKGRFTISRDNAKNTVYLQMNSLKPEDTAVYFCAAGDPSSNYEWGAMDYWGHGTSVTVS

SEQ ID NO: 3545 - protein, 115 aa, synthetic construct
LVESGGGLVQPGGSLRLSCAASGFTLDYYAIGWFRQAPGKEREGVSYISSSGDSTNYADSVKGRFTISRDNAKNTVYLQMNSLKPEDTAVYYCAAYYRCLYAMDYWGQGTSVTVS

SEQ ID NO: 3546 - protein, 119 aa, synthetic construct
QLVESGGGLVQPGGSLRLTCAASGFALDSYAIGWFRQAPGKEREGVSYTSRSGGFTDYADSVKGRFTISRNNAKNSVYLQMNSLKPEDTAVYYCAADGHYRYPKGPMDYWGQGTSVTVS

SEQ ID NO: 3547 - protein, 8 aa, synthetic construct
GRTFSSYN

SEQ ID NO: 3548 - protein, 8 aa, synthetic construct
GFTSNSCG

SEQ ID NO: 3549 - protein, 8 aa, synthetic construct
GFTLNYYA

SEQ ID NO: 3550 - protein, 8 aa, synthetic construct
GFALDSYA

SEQ ID NO: 3551 - protein, 7 aa, synthetic construct
ISSGGST

SEQ ID NO: 3552 - protein, 8 aa, synthetic construct
VISSGGST

SEQ ID NO: 3553 - protein, 7 aa, synthetic construct
TTSGGST

SEQ ID NO: 3554 - protein, 8 aa, synthetic construct
AMTSGGST

SEQ ID NO: 3555 - protein, 8 aa, synthetic construct
ISRSGGST

SEQ ID NO: 3556 - protein, 8 aa, synthetic construct
ISSSGRST

SEQ ID NO: 3557 - protein, 8 aa, synthetic construct
ISRSGDST

SEQ ID NO: 3558 - protein, 8 aa, synthetic construct
TSRSGGFT

SEQ ID NO: 3559 - protein, 15 aa, synthetic construct
AADGDYRYPKGPMDY

SEQ ID NO: 3560 - protein, 16 aa, synthetic construct
AAGDPSGNYEWGAMDY

SEQ ID NO: 3561 - protein, 16 aa, synthetic construct
AAGDPSSNYEWGAMDY

SEQ ID NO: 3562 - protein, 15 aa, synthetic construct
AADGHYRYPKGPMDY

SEQ ID NO: 3563 - protein, 13 aa, synthetic construct
AGVGDYGRRAMDY

SEQ ID NO: 3564 - protein, 15 aa, synthetic construct
AGVGDYRYPKGPMDY

SEQ ID NO: 3565 - protein, 12 aa, synthetic construct
AAYYRCLYAMDY

SEQ ID NO: 3566 - protein, 117 aa, synthetic construct
LQLVESGGGLVQPGGSLRLSCAASGCTLDYYAIGWFRQAPGKEREGVSYISSSGGSTNYADSVKGRFTISRDNAKNTVYLQMNSLKPEDTGVYSCAAAGGYGNSSRYWGQGTSVTVS

SEQ ID NO: 3567 - protein, 117 aa, synthetic construct
LQLVESGGGLVQPGGSLRLSCAASGFNLDYYAIGWFRQAPGKEREGVSYISSSGGSTNYADSVKGRFTISRDNAKNTVYLQMNSLKPEDTGVYSCAAAGGYGNSSRYWGQGTSVTVS

SEQ ID NO: 3568 - protein, 117 aa, synthetic construct
LQLVESGGGLVQPGGSLRLSCAASGFSLDYYAIGWFRQAPGKEREGVSYISSSGGSTNYADSVKGRFTISRDNAKNTVFLQMNSLKPEDTGVYSCAAAGGYGNSSRYWGQGTSVTVS

SEQ ID NO: 3569 - protein, 117 aa, synthetic construct
LQLVESGGGLVQPGGSLRLSCAASGFSLDYYAIGWFRQAPGKEREGVSYISSSGGSTNYADSVKGRFTISRDNAKNTVYLQMNSLKPEDTGVYSCAAAGGYGNSSRYWGQGTSVTVS

SEQ ID NO: 3570 - protein, 117 aa, synthetic construct
LQLVESGGGLVQPGGSLRLSCAASGFSLDYYAIGWFRQAPGKEREGVSYISSSGGSTNYAESVKGRFTISRDNAKNTVFLQMNSLKPEDTGVYSCAAAGGYGNSSRYWGQGTSVTVS

SEQ ID NO: 3571 - protein, 117 aa, synthetic construct
LQLVESGGGLVQPGGSLRLSCAASGFTLDYYAIGWFRQAPGKEREGVAYISSSGGSTNYADGVKGRFTISRDNAKNTVYLQMNSLKPEDTGVYSCAAAGGYGNSSRYWGQGTSVTVS

SEQ ID NO: 3572 - protein, 117 aa, synthetic construct
LQLVESGGGLVQPGGSLRLSCAASGFTLDYYAIGWFRQAPGKEREGVAYISSSGGSTNYADSVKGRFTISRDNAKNTVYLQMNSLKPEDTGVYSCAAAGGYGNSSRHWGQGTSVTVS

SEQ ID NO: 3573 - protein, 117 aa, synthetic construct
LQLVESGGGLVQPGGSLRLSCAASGFTLDYYAIGWFRQAPGKEREGVAYISSSGGSTNYADSVKGRFTISRDNAKNTVYLQMNSLKPEDTGVYSCAAAGGYGNSSRYWGQGTSVTVS

SEQ ID NO: 3574 - protein, 117 aa, synthetic construct
LQLVESGGGLVQPGGSLRLSCAASGFTLDYYAIGWFRQAPGKEREGVAYISSSGGSTNYAESVKGRFTISRDNAKNTVYLQMNSLKPEDTGVYSCAAAGGYGNSSRYWGQGTSVTVS

SEQ ID NO: 3575 - protein, 117 aa, synthetic construct
LQLVESGGGLVQPGGSLRLSCAASGFTLDYYAIGWFRQAPGKEREGVSYISSSGGSTNYADGVKGRFTISRDNAKNTVFLQMNSLKPEDTGVYSCAAAGGYGNSSRYWGQGTSVTVS

SEQ ID NO: 3576 - protein, 117 aa, synthetic construct
LQLVESGGGLVQPGGSLRLSCAASGFTLDYYAIGWFRQAPGKEREGVSYISSSGGSTNYADGVKGRFTISRDNAKNTVSLQMNSLKPEDTGVYSCAAAGGYGNSSRYWGQGTSVTVS

SEQ ID NO: 3577 - protein, 117 aa, synthetic construct
LQLVESGGGLVQPGGSLRLSCAASGFTLDYYAIGWFRQAPGKEREGVSYISSSGGSTNYADGVKGRFTISRDNAKNTVYLQMNSLKPEDTGVYSCAAAGGYGNFSRYWGQGTSVTVS

SEQ ID NO: 3578 - protein, 117 aa, synthetic construct
LQLVESGGGLVQPGGSLRLSCAASGFTLDYYAIGWFRQAPGKEREGVSYISSSGGSTNYADGVKGRFTISRDNAKNTVYLQMNSLKPEDTGVYSCAAAGGYGNSSRFWGQGTSVTVS

SEQ ID NO: 3579 - protein, 117 aa, synthetic construct
LQLVESGGGLVQPGGSLRLSCAASGFTLDYYAIGWFRQAPGKEREGVSYISSSGGSTNYADGVKGRFTISRDNAKNTVYLQMNSLKPEDTGVYSCAAAGGYGNSSRHWGQGTSVTVS

SEQ ID NO: 3580 - protein, 117 aa, synthetic construct
LQLVESGGGLVQPGGSLRLSCAASGFTLDYYAIGWFRQAPGKEREGVSYISSSGGSTNYADGVKGRFTISRDNAKNTVYLQMNSLKPEDTGVYSCAAAGGYGNSSRYWGPGTSVTVS

SEQ ID NO: 3581 - protein, 117 aa, synthetic construct
LQLVESGGGLVQPGGSLRLSCAASGFTLDYYAIGWFRQAPGKEREGVSYISSSGGSTNYADGVKGRFTISRDNAKNTVYLQMNSLKPEDTGVYSCAAAGGYGNSSRYWGQGTSVTVS

SEQ ID NO: 3582 - protein, 117 aa, synthetic construct
LQLVESGGGLVQPGGSLRLSCAASGFTLDYYAIGWFRQAPGKEREGVSYISSSGGSTNYADSVKGRFAISRDNAKNTVYLQMNSLKPEDTGVYSCAAAGGYGNSSRYWGQGTSVTVS

SEQ ID NO: 3583 - protein, 117 aa, synthetic construct
LQLVESGGGLVQPGGSLRLSCAASGFTLDYYAIGWFRQAPGKEREGVSYISSSGGSTNYADSVKGRFPISRDNAKNTVYLQMNSLKPEDTGVYSCAAAGGYGNSSRYWGQGTSVTVS

SEQ ID NO: 3584 - protein, 117 aa, synthetic construct
LQLVESGGGLVQPGGSLRLSCAASGFTLDYYAIGWFRQAPGKEREGVSYISSSGGSTNYADSVKGRFSISRDNAKNTVYLQMNSLKPEDTGVYSCAAAGGYGNSSRHWGQGTSVTVS

SEQ ID NO: 3585 - protein, 117 aa, synthetic construct
LQLVESGGGLVQPGGSLRLSCAASGFTLDYYAIGWFRQAPGKEREGVSYISSSGGSTNYADSVKGRFSISRDNAKNTVYLQMNSLKPEDTGVYSCAAAGGYGNSSRYWGQGTSVTVS

SEQ ID NO: 3586 - protein, 117 aa, synthetic construct
LQLVESGGGLVQPGGSLRLSCAASGFTLDYYAIGWFRQAPGKEREGVSYISSSGGSTNYADSVKGRFTISRDNAKNTAYLQMNSLKPEDTGVYSCAAAGGYGNSPRYWGQGTSVTVS

SEQ ID NO: 3587 - protein, 117 aa, synthetic construct
LQLVESGGGLVQPGGSLRLSCAASGFTLDYYAIGWFRQAPGKEREGVSYISSSGGSTNYADSVKGRFTISRDNAKNTVFLQMNSLKPEDTGVYSCAAAGGYGNFSRYWGQGTSVTVS

SEQ ID NO: 3588 - protein, 117 aa, synthetic construct
LQLVESGGGLVQPGGSLRLSCAASGFTLDYYAIGWFRQAPGKEREGVSYISSSGGSTNYADSVKGRFTISRDNAKNTVFLQMNSLKPEDTGVYSCAAAGGYGNSSRHWGQGTSVTVS

SEQ ID NO: 3589 - protein, 117 aa, synthetic construct
LQLVESGGGLVQPGGSLRLSCAASGFTLDYYAIGWFRQAPGKEREGVSYISSSGGSTNYADSVKGRFTISRDNAKNTVFLQMNSLKPEDTGVYSCAAAGGYGNSSRYWGQGTSVTVS

SEQ ID NO: 3590 - protein, 117 aa, synthetic construct
LQLVESGGGLVQPGGSLRLSCAASGFTLDYYAIGWFRQAPGKEREGVSYISSSGGSTNYADSVKGRFTISRDNAKNTVSLQMNSLKPEATGVYSCAAAGGYGNSSRYWGQGTSVTVS

SEQ ID NO: 3591 - protein, 117 aa, synthetic construct
LQLVESGGGLVQPGGSLRLSCAASGFTLDYYAIGWFRQAPGKEREGVSYISSSGGSTNYADSVKGRFTISRDNAKNTVSLQMNSLKPEDTGVYSCAAAGGYGNSPRYWGQGTSVTVS

SEQ ID NO: 3592 - protein, 117 aa, synthetic construct
LQLVESGGGLVQPGGSLRLSCAASGFTLDYYAIGWFRQAPGKEREGVSYISSSGGSTNYADSVKGRFTISRDNAKNTVSLQMNSLKPEDTGVYSCAAAGGYGNSSRYWGQGTSVTVS

SEQ ID NO: 3593 - protein, 117 aa, synthetic construct
LQLVESGGGLVQPGGSLRLSCAASGFTLDYYAIGWFRQAPGKEREGVSYISSSGGSTNYADSVKGRFTISRDNAKNTVSLQMNSLKPEDTGVYSCAAAGGYGNSTRYWGQGTSVTVS

SEQ ID NO: 3594 - protein, 117 aa, synthetic construct
LQLVESGGGLVQPGGSLRLSCAASGFTLDYYAIGWFRQAPGKEREGVSYISSSGGSTNYADSVKGRFTISRDNAKNTVYLQMHSLKPEDTGVYSCAAAGGYGNSSRYWGQGTSVTVS

SEQ ID NO: 3595 - protein, 117 aa, synthetic construct
LQLVESGGGLVQPGGSLRLSCAASGFTLDYYAIGWFRQAPGKEREGVSYISSSGGSTNYADSVKGRFTISRDNAKNTVYLQMNSLKPEDTGVYSCAAAGGYGNFSRYWGQGTSVTVS

SEQ ID NO: 3596 - protein, 117 aa, synthetic construct
LQLVESGGGLVQPGGSLRLSCAASGFTLDYYAIGWFRQAPGKEREGVSYISSSGGSTNYADSVKGRFTISRDNAKNTVYLQMNSLKPEDTGVYSCAAAGGYGNFSRYWGQVTSVTVS

SEQ ID NO: 3597 - protein, 117 aa, synthetic construct
LQLVESGGGLVQPGGSLRLSCAASGFTLDYYAIGWFRQAPGKEREGVSYISSSGGSTNYADSVKGRFTISRDNAKNTVYLQMNSLKPEDTGVYSCAAAGGYGNSPRHWGQGTSVTVS

SEQ ID NO: 3598 - protein, 117 aa, synthetic construct
LQLVESGGGLVQPGGSLRLSCAASGFTLDYYAIGWFRQAPGKEREGVSYISSSGGSTNYADSVKGRFTISRDNAKNTVYLQMNSLKPEDTGVYSCAAAGGYGNSPRYWGPGTSVTVS

SEQ ID NO: 3599 - protein, 117 aa, synthetic construct
LQLVESGGGLVQPGGSLRLSCAASGFTLDYYAIGWFRQAPGKEREGVSYISSSGGSTNYADSVKGRFTISRDNAKNTVYLQMNSLKPEDTGVYSCAAAGGYGNSPRYWGQGTSVTVS

SEQ ID NO: 3600 - protein, 117 aa, synthetic construct
LQLVESGGGLVQPGGSLRLSCAASGFTLDYYAIGWFRQAPGKEREGVSYISSSGGSTNYADSVKGRFTISRDNAKNTVYLQMNSLKPEDTGVYSCAAAGGYGNSSRCWGQGTSVTVS

SEQ ID NO: 3601 - protein, 117 aa, synthetic construct
LQLVESGGGLVQPGGSLRLSCAASGFTLDYYAIGWFRQAPGKEREGVSYISSSGGSTNYADSVKGRFTISRDNAKNTVYLQMNSLKPEDTGVYSCAAAGGYGNSSRDWGQGTSVTVS

SEQ ID NO: 3602 - protein, 117 aa, synthetic construct
LQLVESGGGLVQPGGSLRLSCAASGFTLDYYAIGWFRQAPGKEREGVSYISSSGGSTNYADSVKGRFTISRDNAKNTVYLQMNSLKPEDTGVYSCAAAGGYGNSSREWGQGTSVTVS

SEQ ID NO: 3603 - protein, 117 aa, synthetic construct
LQLVESGGGLVQPGGSLRLSCAASGFTLDYYAIGWFRQAPGKEREGVSYISSSGGSTNYADSVKGRFTISRDNAKNTVYLQMNSLKPEDTGVYSCAAAGGYGNSSRFWGQGTSVTVS

SEQ ID NO: 3604 - protein, 117 aa, synthetic construct
LQLVESGGGLVQPGGSLRLSCAASGFTLDYYAIGWFRQAPGKEREGVSYISSSGGSTNYADSVKGRFTISRDNAKNTVYLQMNSLKPEDTGVYSCAAAGGYGNSSRHWGQGTSVTVS

SEQ ID NO: 3605 - protein, 117 aa, synthetic construct
LQLVESGGGLVQPGGSLRLSCAASGFTLDYYAIGWFRQAPGKEREGVSYISSSGGSTNYADSVKGRFTISRDNAKNTVYLQMNSLKPEDTGVYSCAAAGGYGNSSRSWGQGTSVTVS

SEQ ID NO: 3606 - protein, 117 aa, synthetic construct
LQLVESGGGLVQPGGSLRLSCAASGFTLDYYAIGWFRQAPGKEREGVSYISSSGGSTNYADSVKGRFTISRDNAKNTVYLQMNSLKPEDTGVYSCAAAGGYGNSSRYWGPGTSVTVS

SEQ ID NO: 3607 - protein, 117 aa, synthetic construct
LQLVESGGGLVQPGGSLRLSCAASGFTLDYYAIGWFRQAPGKEREGVSYISSSGGSTNYADSVKGRFTISRDNAKNTVYLQMNSLKPEDTGVYSCAAAGGYGNSSRYWGQVTSVTVS

SEQ ID NO: 3608 - protein, 117 aa, synthetic construct
LQLVESGGGLVQPGGSLRLSCAASGFTLDYYAIGWFRQAPGKEREGVSYISSSGGSTNYADSVKGRFTISRDNAKNTVYLQMNSLKPEDTGVYSCAAAVGYGNSSRYWGPGTSVTVS

SEQ ID NO: 3609 - protein, 117 aa, synthetic construct
LQLVESGGGLVQPGGSLRLSCAASGFTLDYYAIGWFRQAPGKEREGVSYISSSGGSTNYADSVKRRFTISRDNAKNTVYLQMNSLKPEDTGVYSCAAAGGYGNFSRYWGQGTSVTVS

SEQ ID NO: 3610 - protein, 117 aa, synthetic construct
LQLVESGGGLVQPGGSLRLSCAASGFTLDYYAIGWFRQAPGKEREGVSYISSSGGSTNYAESVKGRFTISRDNAKNTVFLQMNSLKPEDTGVYSCAAAGGYGNFSRYWGQGTSVTVS

SEQ ID NO: 3611 - protein, 117 aa, synthetic construct
LQLVESGGGLVQPGGSLRLSCAASGFTLDYYAIGWFRQAPGKEREGVSYISSSGGSTNYAESVKGRFTISRDNAKNTVFLQMNSLKPEDTGVYSCAAAGGYGNSSRYWGQGTSVTVS

SEQ ID NO: 3612 - protein, 117 aa, synthetic construct
LQLVESGGGLVQPGGSLRLSCAASGFTLDYYAIGWFRQAPGKEREGVSYISSSGGSTNYAESVKGRFTISRDNAKNTVYLQMNSLKPEDTGVYSCAAAGGYGNSPRYWGQGTSVTVS

SEQ ID NO: 3613 - protein, 117 aa, synthetic construct
LQLVESGGGLVQPGGSLRLSCAASGFTLDYYAIGWFRQAPGKEREGVSYISSSGGSTNYAESVKGRFTISRDNAKNTVYLQMNSLKPEDTGVYSCAAAGGYGNSSRHWGQGTSVTVS

SEQ ID NO: 3614 - protein, 117 aa, synthetic construct
LQLVESGGGLVQPGGSLRLSCAASGFTLDYYAIGWFRQAPGKEREGVSYISSSGGSTNYAESVKGRFTISRDNAKNTVYLQMNSLKPEDTGVYSCAAAGGYGNSSRYWGQGTSVTVS

SEQ ID NO: 3615 - protein, 117 aa, synthetic construct
LQLVESGGGLVQPGGSLRLSCAASGFTLDYYAIGWFRQAPGKEREGVSYISSSGGSTNYANSVKGRFTISRDNAKNTVYLQMNSLKPEDTGVYSCAAAGGYGNSSRYWGQGTSVTVS

SEQ ID NO: 3616 - protein, 117 aa, synthetic construct
LQLVESGGGLVQPGGSLRLSCAASGFTLDYYAIGWFRQAPGKEREGVSYISSSGGSTNYAVSVKGRFTISRDNAKNTVYLQMNSLKPEDTGVYSCAAAGGYGNSSRYWGQGTSVTVS

SEQ ID NO: 3617 - protein, 117 aa, synthetic construct
LQLVESGGGLVQPGGSLRLSCAASGFTLDYYAIGWFRQAPGKEREGVSYISSSGGSTNYAYSVKGRFTISRDNAKNTVYLQMNSLKPEDTGVYSCAAAGGYGNSSRYWGQGTSVTVS

SEQ ID NO: 3618 - protein, 117 aa, synthetic construct
LQLVESGGGLVQPGGSLRLSCAASGFTLDYYAIGWSRQAPGKEREGVSYISSSGGSTNYADGVKGRFTISRDNAKNTVYLQMNSLKPEDTGVYSCAAAGGYGNSSRYWGQGTSVTVS

SEQ ID NO: 3619 - protein, 117 aa, synthetic construct
LQLVESGGGLVQPGGSLRLSCAASGFTLDYYAIGWSRQAPGKEREGVSYISSSGGSTNYADSVKGRFTISRDNAKNTVSLQMNSLKPEDTGVYSCAAAGGYGNSSRYWGQGTSVTVS

SEQ ID NO: 3620 - protein, 117 aa, synthetic construct
LQLVESGGGLVQPGGSLRLSCAASGFTLDYYAIGWSRQAPGKEREGVSYISSSGGSTNYADSVKGRFTISRDNAKNTVYLQMNSLKPEDTGVYSCAAAGGYGNFSRYWGQGTSVTVS

SEQ ID NO: 3621 - protein, 117 aa, synthetic construct
LQLVESGGGLVQPGGSLRLSCAASGFTLDYYAIGWSRQAPGKEREGVSYISSSGGSTNYADSVKGRFTISRDNAKNTVYLQMNSLKPEDTGVYSCAAAGGYGNSSRYWGPGTSVTVS

SEQ ID NO: 3622 - protein, 117 aa, synthetic construct
LQLVESGGGLVQPGGSLRLSCAASGFTLDYYAIGWSRQAPGKEREGVSYISSSGGSTNYADSVKGRFTISRDNAKNTVYLQMNSLKPEDTGVYSCAAAGGYGNSSRYWGQGTSVTVS

SEQ ID NO: 3623 - protein, 117 aa, synthetic construct
LQLVESGGGLVQPGGSLRLSCAASGLTLDYYAIGWFRQAPGKEREGVSYISSSGGSTNYADSVKGRFTISRDNAKNTVYLQMNSLKPEDTGVYSCAAAGGYGNSSRYWGQGTSVTVS

SEQ ID NO: 3624 - protein, 117 aa, synthetic construct
LQLVESGGGLVQPGGSLRLSCAASGSTLDYYAIGWFRQAPGKEREGVSYISSSGGSTNYADSVKGRFTISRDNAKNTVYLQMNSLKPEDTGVYSCAAAGGYGNSSRYWGQGTSVTVS

SEQ ID NO: 3625 - protein, 117 aa, synthetic construct
LQLVESGGGLVQPGGSLRLSCAASGVTLDYYAIGWFRQAPGKEREGVSYISSSGGSTNYADSVKGRFTISRDNAKNTVFLQMNSLKPEDTGVYSCAAAGGYGNSSRYWGQGTSVTVS

SEQ ID NO: 3626 - protein, 117 aa, synthetic construct
LQLVESGGGLVQPGGSLRLSCAASGVTLDYYAIGWFRQAPGKEREGVSYISSSGGSTNYADSVKGRFTISRDNAKNTVYLQMNSLKPEDTGVYSCAAAGGYGNFSRYWGQGTSVTVS

SEQ ID NO: 3627 - protein, 117 aa, synthetic construct
LQLVESGGGLVQPGGSLRLSCAASGVTLDYYAIGWFRQAPGKEREGVSYISSSGGSTNYADSVKGRFTISRDNAKNTVYLQMNSLKPEDTGVYSCAAAGGYGNSSRYWGPGTSVTVS

SEQ ID NO: 3628 - protein, 117 aa, synthetic construct
LQLVESGGGLVQPGGSLRLSCAASGVTLDYYAIGWFRQAPGKEREGVSYISSSGGSTNYADSVKGRFTISRDNAKNTVYLQMNSLKPEDTGVYSCAAAGGYGNSSRYWGQGTSVTVS

SEQ ID NO: 3629 - protein, 117 aa, synthetic construct
LQLVESGGGLVQPGGSLRLSCAASGYTLDYYAIGWFRQAPGKEREGVSYISSSGGSTNYADSVKGRFTISRDNAKNTVYLQMNSLKPEDTGVYSCAAAGGYGNSSRYWGQGTSVTVS

SEQ ID NO: 3630 - protein, 117 aa, synthetic construct
LQMVESGGGLVQPGGSLRLSCAASGFTLDYYAIGWFRQAPGKEREGVSYISSSGGSTNYADSVKGRFTISRDNAKNTVFLQMNSLKPEDTGVYSCAAAGGYGNSSRYWGQGTSVTVS

SEQ ID NO: 3631 - protein, 116 aa, synthetic construct
QLVESGGGLVQPGGSLRLSCAASGFALDYYAIGWFRQAPGKEREGVSYISSSGGSTNYADSVKGRFTISRDNAKNTVYLQMNSLKPEDTGVYSCAAAGGYGNSSRYWGQGTSVTVS

SEQ ID NO: 3632 - protein, 116 aa, synthetic construct
QLVESGGGLVQPGGSLRLSCAASGFSLDYYAIGWFRQAPGKEREGVAYISSSGGSTNYADSVKGRFTISRDNAKNTVYLQMNSLKPEDTGVYSCAAAGGYGNSSRYWGQGTSVTVS

SEQ ID NO: 3633 - protein, 116 aa, synthetic construct
QLVESGGGLVQPGGSLRLSCAASGFSLDYYAIGWFRQAPGKEREGVSYISSSGGSTNYADGVKGRFTISRDNAKNTVYLQMNSLKPEDTGVYSCAAAGGYGNSSRYWGQGTSVTVS

SEQ ID NO: 3634 - protein, 116 aa, synthetic construct
QLVESGGGLVQPGGSLRLSCAASGFSLDYYAIGWFRQAPGKEREGVSYISSSGGSTNYADSVKGRFTISRDNAKNTVYLQMNSLKPEDTGVYSCAAAGGYGNFSRYWGQGTSVTVS

SEQ ID NO: 3635 - protein, 116 aa, synthetic construct
QLVESGGGLVQPGGSLRLSCAASGFSLDYYAIGWFRQAPGKEREGVSYISSSGGSTNYADSVKGRFTISRDNAKNTVYLQMNSLKPEDTGVYSCAAAGGYGNSSRCWGQGTSVTVS

SEQ ID NO: 3636 - protein, 116 aa, synthetic construct
QLVESGGGLVQPGGSLRLSCAASGFSLDYYAIGWFRQAPGKEREGVSYISSSGGSTNYADSVKGRFTISRDNAKNTVYLQMNSLKPEDTGVYSCAAAGGYGNSSRHWGQGTSVTVS

SEQ ID NO: 3637 - protein, 116 aa, synthetic construct
QLVESGGGLVQPGGSLRLSCAASGFSLDYYAIGWFRQAPGKEREGVSYISSSGGSTNYADSVKGRFTISRDNAKNTVYLQMNSLKPEDTGVYSCAAAGGYGNSSRYWGQGTSVTVS

SEQ ID NO: 3638 - protein, 116 aa, synthetic construct
QLVESGGGLVQPGGSLRLSCAASGFSLDYYAIGWFRQAPGKEREGVSYISSSGGSTNYAESVKGRFTISRDNAKNTVYLQMNSLKPEDTGVYSCAAAGGYGNSSRYWGQGTSVTVS

SEQ ID NO: 3639 - protein, 117 aa, synthetic construct
VQLVESGGGLVQAGGSLRLSCAASGRNFSSYPMGWFRQAPGKEREGVSYISSSGGSTNYADSVKGRFTISRDNAKNTVYLQMNSLKPEDTGVYSCAAAGGYGNSSRYWGQGTSVTVS

SEQ ID NO: 3640 - protein, 117 aa, synthetic construct
VQLVESGGGLVQAGGSLRLSCVASGRTFSSYAMGWFRQAPGKEREGVSYISSSGGSTNYADSVKGRFTISRDNAKNTVYLQMNSLKPEDTGVYSCAAAGGYGNSSRYWGQGTSVTVS

SEQ ID NO: 3641 - protein, 116 aa, synthetic construct
LEESGGGSVQAGGSLRLSCTALGFRSNSCGMDWYRQAPGKEREFVSSIDRDGTTSYADSVKGRFTISKDKAKDTFYLQMNNLKPEDTAMYSCKAYGYDENYYAMDYWGQGTSVTVS

SEQ ID NO: 3642 - protein, 118 aa, synthetic construct
VKLEESGGGSVQAGGSLRLSCTALGFRSNSCGMDWYRQAPGKEREFVASISADGTTSYADSVKGRFTISKDKAKDTFYLQMNNLKPEDTAMYLCKAYGYDENYFAMDYWGQGTSVTVS

SEQ ID NO: 3643 - protein, 118 aa, synthetic construct
VKLEESGGGSVQAGGSLRLSCTALGFRSNSCGMDWYRQAPGKEREFVSSIDRDGTTSYADSVKGRFTISKDKAKDTFYLQMNNLKPEDTAMYSCKAYGYDENYYAMDYWGQGTSVTVS

SEQ ID NO: 3644 - protein, 118 aa, synthetic construct
VKLEESGGGSVQAGGSLRLSCTALGFRSNSCGMDWYRQAPGKEREFVSSIDRDGTTSYADSVKGRFTISKDKAKDTFYLQMNSLKPEDSAMYSCKAYGYDENYFPMDYWGQGTSVTVS

SEQ ID NO: 3645 - protein, 118 aa, synthetic construct
VKLEESGGGSVQAGGSLRLSCTALGFRSNSCGMDWYRQAPGKEREFVSSIDRDGTTSYADSVKGRFTISKDKAKDTFYLQMNSLKPEDSAMYSCKAYGYDENYYAMDYWGQGTSVTVS

SEQ ID NO: 3646 - protein, 118 aa, synthetic construct
VKLEESGGGSVQAGGSLRLSCTALGFRSNSCGMDWYRQAPGKEREFVSSIDRDGTTSYADSVKGRFTISKDKAKDTFYLQMNSLKPEDTAMYSCKAYGYDENYFPMDYWGQGTSVTVS

SEQ ID NO: 3647 - protein, 118 aa, synthetic construct
VKLEESGGGSVQAGGSLRLSCTALGFRSNSCGMDWYRQAPGKEREFVSSIDRDGTTSYADSVKGRFTISKDKAKDTFYLQMNSLKPEDTAMYSCKAYGYDENYYAMAYWGQGTSVTVS

SEQ ID NO: 3648 - protein, 118 aa, synthetic construct
VKLEESGGGSVQAGGSLRLSCTALGFRSNSCGMDWYRQAPGKEREFVSSIDRDGTTSYADSVKGRFTISKDKAKDTFYLQMNSLKPEDTAMYSCKAYGYDENYYAMDYWGQGTSVTVS

SEQ ID NO: 3649 - protein, 118 aa, synthetic construct
VKLEESGGGSVQAGGSLRLSCTALGFRSNSCGMDWYRQAPGKEREFVSSIDRDGTTSYADSVKGRFTISKDKAKDTFYLQMNSLKPEDTAMYSCKAYGYDKNYYAMDYWGQGTSVTVS

SEQ ID NO: 3650 - protein, 118 aa, synthetic construct
VKLEESGGGSVQAGGSLRLSCTALGFRSNSCGMDWYRQAPGKEREFVSSIDRDGTTSYADSVKGRFTISKDKAKDTFYLQMNSLKPEDTAVYSCKAYGYDENYYAMAYWGQGTSVTVS

SEQ ID NO: 3651 - protein, 118 aa, synthetic construct
VKLEESGGGSVQAGGSLRLSCTALGFRSNSCGMDWYRQAPGKEREFVSSISADGTTSYADSVKGRFTISKDKAKDTFYLQMNNLKPEDTAMYSCKAYGYDENYYAMDYWGQGTSVTVS

SEQ ID NO: 3652 - protein, 118 aa, synthetic construct
VKLEESGGGSVQAGGSLRLSCTALGFRSNSCGMDWYRQAPGKEREFVSSISADGTTSYADSVKGRFTISKDKAKDTFYLQMNSLKPEDSAMYSCKAYGYDENYYAMDYWGQGTSVTVS

SEQ ID NO: 3653 - protein, 118 aa, synthetic construct
VKLEESGGGSVQAGGSLRLSCTALGFRSNSCGMDWYRQAPGKEREFVSSISADGTTSYADSVKGRFTISKDKAKDTFYLQMNSLKPEDTAMYSCKAYGYDENYFPMDYWGQGTSVTVS

SEQ ID NO: 3654 - protein, 118 aa, synthetic construct
VKLEESGGGSVQAGGSLRLSCTALGFRSNSCGMDWYRQAPGKEREFVSSISADGTTSYADSVKGRFTISKDKAKDTFYLQMNSLKPEDTAMYSCKAYGYDENYYAMDYWGQGTSVTVS

SEQ ID NO: 3655 - protein, 118 aa, synthetic construct
VKLEESGGGSVQAGGSLRLSCTALGFRSNSCGMDWYRQAPGKEREFVSSISADGTTSYADSVKGRFTISKDKAKDTFYLQMNSLKPEDTAVYSCKAYGYDENYYAMAYWGQGTSVTVS

SEQ ID NO: 3656 - protein, 118 aa, synthetic construct
VKLEESGGGSVQAGGSLRLSCTALGFRSNSCGMDWYRQAPGKEREFVSSISPDGTTSYADSVKGRFTISKDKAKDTFYLQMNNLKPEDTAMYSCKAYGYDENYYAMDYWGQGTSVTVS

SEQ ID NO: 3657 - protein, 118 aa, synthetic construct
VKLEESGGGSVQAGGSLRLSCTALGFRSNSCGMDWYRQAPGKEREFVSSISPDGTTSYADSVKGRFTISKDKAKDTFYLQMNSLKPEDTAMYSCKAYGYDKNYYAMDYWGQGTSVTVS

SEQ ID NO: 3658 - protein, 118 aa, synthetic construct
VKLEESGGGSVQAGGSLRLSCTALGFRSNSCGMDWYRQAPGKEREFVSSISPDGTTSYADSVKGRFTISKDKAKDTFYLQMNSLKPEDTAVYSCKAYGYDENYYAMDYWGQGTSVTVS

SEQ ID NO: 3659 - protein, 118 aa, synthetic construct
VKLEESGGGSVQAGGSLRLSCTAPGFKRNSWGMDWYRQAPGKEREFVASISADGTTSYADSVKGRFTISKDKAKDTFYLQMNNLKPEDTAMYLCKAYGYDENYFAMDYWGQGTSVTVS

SEQ ID NO: 3660 - protein, 118 aa, synthetic construct
VKLEESGGGSVQAGGSLRLSCTAPGFKSNRYGMDWYRQAPGKEREFVSSISADGTTSYADSVKGRFTISKDKAKDTFYLQMNSLKPEDTAMYSCKAYGYDENYYAMDYWGQGTSVTVS

SEQ ID NO: 3661 - protein, 118 aa, synthetic construct
VKLEESGGGSVQAGGSLRLSCTAPGFKSNSCGMDWYRQAPGKEREFVSSISADGTTSYADSVKGRFTISKDKAKDTFYLQMNNLKPEDTAMYSCKAYGYDENYYAMDYWGQGTSVTVS

SEQ ID NO: 3662 - protein, 118 aa, synthetic construct
VKLEESGGGSVQAGGSLRLSCTAPGFKSNSCGMDWYRQAPGKEREFVSSISADGTTSYADSVKGRFTISKDKAKDTFYLQMNSLKPEDTAMYSCKAYGYDENYFPMDYWGQGTSVTVS

SEQ ID NO: 3663 - protein, 118 aa, synthetic construct
VKLEESGGGSVQAGGSLRLSCTAPGFKSNSCGMDWYRQAPGKEREFVSSISADGTTSYADSVKGRFTISKDKAKDTFYLQMNSLKPEDTAMYSCKAYGYDENYYAMDYWGQGTSVTVS

SEQ ID NO: 3664 - protein, 118 aa, synthetic construct
VKLEESGGGSVQAGGSLRLSCTAPGFKSNSCGMDWYRQAPGKEREFVSSISADGTTSYADSVKGRFTISKDKAKDTFYLQMNSLKPEDTAMYSCKAYGYDKNYYAMDYWGQGTSVTVS

SEQ ID NO: 3665 - protein, 118 aa, synthetic construct
VKLEESGGGSVQAGGSLRLSCTAPGFKSNSCGMDWYRQAPGKEREFVSSISPDGTTSYADSVKGRFTISKDKAKDTFYLQMNSLKPEDTAMYSCKAYGYDKNYYAMDYWGQGTSVTVS

SEQ ID NO: 3666 - protein, 118 aa, synthetic construct
VKLEESGGGSVQAGGSLRLSCTAPGFKSNSWGMDWYRQAPGKEREFVASISADGTTSYADSVKGRFTISKDKAKDTFYLQMNNLKPEDTAMYSCKAYGYDENYYAMDYWGQGTSVTVS

SEQ ID NO: 3667 - protein, 118 aa, synthetic construct
VKLEESGGGSVQAGGSLRLSCTAPGFKSNSWGMDWYRQAPGKEREFVSSISADGTTSYADSVKGRFTISKDKAKDTFYLQMNNLKPEDTAMYSCKAYGYDENYYAMDYWGQGTSVTVS

SEQ ID NO: 3668 - protein, 118 aa, synthetic construct
VKLEESGGGSVQAGGSLRLSCTAPGFKSNSWGMDWYRQAPGKEREFVSSISADGTTSYADSVKGRFTISKDKAKDTFYLQMNSLKPEDTAMYSCKAYGYDENYFPMDYWGQGTSVTVS

SEQ ID NO: 3669 - protein, 118 aa, synthetic construct
VKLEESGGGSVQAGGSLRLSCTAPGFKSNSWGMDWYRQAPGKEREFVSSISADGTTSYADSVKGRFTISKDKAKDTFYLQMNSLKPEDTAMYSCKAYGYDENYYAMDYWGQGTSVTVS

SEQ ID NO: 3670 - protein, 118 aa, synthetic construct
VKLEESGGGSVQAGGSLRLSCTAPGFRSNSCGMDWYRQAPGKEREFVSSIDRDGTTSYADSVKGRFTISKDKAKDTFYLQMNSLKPEDTAMYSCKAYGYDENYYAMDYWGQGTSVTVS

SEQ ID NO: 3671 - protein, 118 aa, synthetic construct
VKLEESGGGSVQAGGSLRLSCTAPGFRSNSCGMDWYRQAPGKEREFVSSISADGTTSYADSVKGRFTISKDKAKDTFYLQMNNLKPEDTAMYSCKAYGYDENYYAMDYWGQGTSVTVS

SEQ ID NO: 3672 - protein, 118 aa, synthetic construct
VKLEESGGGSVQAGGSLRLSCTAPGFRSNSCGMDWYRQAPGKEREFVSSISADGTTSYADSVKGRFTISKDKAKDTFYLQMNSLKPEDSAMYSCKAYGYDENYYAMDYWGQGTSVTVS

SEQ ID NO: 3673 - protein, 118 aa, synthetic construct
VKLEESGGGSVQAGGSLRLSCTAPGFRSNSCGMDWYRQAPGKEREFVSSISADGTTSYADSVKGRFTISKDKAKDTFYLQMNSLKPEDTAMYSCKAYGYDENYFPMDYWGQGTSVTVS

SEQ ID NO: 3674 - protein, 118 aa, synthetic construct
VKLEESGGGSVQAGGSLRLSCTAPGFRSNSCGMDWYRQAPGKEREFVSSISADGTTSYADSVKGRFTISKDKAKDTFYLQMNSLKPEDTAMYSCKAYGYDENYYAMDYWGQGTSVTVS

SEQ ID NO: 3675 - protein, 118 aa, synthetic construct
VKLEESGGGSVQAGGSLRLSCTAPGFRSNSCGMDWYRQAPGKEREFVSSISPDGTTSYADSVKGRFTISKDKAKDTFYLQMNSLKPEDTAMYSCKAYGYDENYFPMDYWGQGTSVTVS

SEQ ID NO: 3676 - protein, 118 aa, synthetic construct
VKLEESGGGSVQAGGSLRLSCTAPGFRSNSCGMDWYRQAPGKEREFVSSISPDGTTSYADSVKGRFTISKDKAKDTFYLQMNSLKPEDTAMYSCKAYGYDENYYAMDYWGQGTSVTVS

SEQ ID NO: 3677 - protein, 118 aa, synthetic construct
VKLEESGGGSVQAGGSLRLSCTAPGFRSNSCGMDWYRQAPGKEREFVSSISPDGTTSYADSVKGRFTISKDKAKDTFYLQMNSLKPEDTAMYSCKAYGYDKNYYAMDYWGQGTSVTVS

SEQ ID NO: 3678 - protein, 118 aa, synthetic construct
VKLEESGGGSVQAGGSLRLSCTAPGLRSNSCGMDWYRQALGKEREFVASISADGTTSYADSVKGRFTISKDKAKDTFYLQMNNLKPEDTAMYSCKAYGYDENYYAMDYWGQGTSVTVS

SEQ ID NO: 3679 - protein, 118 aa, synthetic construct
VKLEESGGGSVQAGGSLRLSCTAPGLRSNSCGMDWYRQALGKEREFVSSISADGTTSYADSVKGRFTISKDKAKDTFYLQMNNLKPEDTAMYSCKAYGYDENYYAMDYWGQGTSVTVS

SEQ ID NO: 3680 - protein, 118 aa, synthetic construct
VKLEESGGGSVQAGGSLRLSCTAPGLRSNSCGMDWYRQALGKEREFVSSISADGTTSYADSVKGRFTISKDKAKDTFYLQMNSLKPEDSAMYSCKAYGYDENYFPMDYWGQGTSVTVS

SEQ ID NO: 3681 - protein, 118 aa, synthetic construct
VKLEESGGGSVQAGGSLRLSCTAPGLRSNSCGMDWYRQALGKEREFVSSISADGTTSYADSVKGRFTISKDKAKDTFYLQMNSLKPEDSAMYSCKAYGYDENYYAMDYWGQGTSVTVS

SEQ ID NO: 3682 - protein, 118 aa, synthetic construct
VKLEESGGGSVQAGGSLRLSCTAPGLRSNSCGMDWYRQALGKEREFVSSISADGTTSYADSVKGRFTISKDKAKDTFYLQMNSLKPEDTAMYSCKAYGYDENYFPMDYWGQGTSVTVS

SEQ ID NO: 3683 - protein, 118 aa, synthetic construct
VKLEESGGGSVQAGGSLRLSCTAPGLRSNSCGMDWYRQALGKEREFVSSISADGTTSYADSVKGRFTISKDKAKDTFYLQMNSLKPEDTAMYSCKAYGYDENYYAMDYWGQGTSVTVS

SEQ ID NO: 3684 - protein, 118 aa, synthetic construct
VKLEESGGGSVQAGGSLRLSCTAPGLRSNSCGMDWYRQALGKEREFVSSISADGTTSYADSVKGRFTISKDKAKDTFYLQMNSLKPEDTAVYSCKAYGYDENYYAMAYWGQGTSVTVS

SEQ ID NO: 3685 - protein, 118 aa, synthetic construct
VKLEESGGGSVQAGGSLRLSCTAPGLRSNSCGMDWYRQALGKEREFVSSISPDGTTSYADSVKGRFTISKDKAKDTFYLQMNNLKPEDTAMYLCKAYGYDENYFAMDYWGQGTSVTVS

SEQ ID NO: 3686 - protein, 118 aa, synthetic construct
VKLEESGGGSVQAGGSLRLSCTAPGLRSNSCGMDWYRQALGKEREFVSSISPDGTTSYADSVKGRFTISKDKAKDTFYLQMNNLKPEDTAMYSCKAYGYDENYFPMDYWGQGTSVTVS

SEQ ID NO: 3687 - protein, 118 aa, synthetic construct
VKLEESGGGSVQAGGSLRLSCTAPGLRSNSCGMDWYRQALGKEREFVSSISPDGTTSYADSVKGRFTISKDKAKDTFYLQMNNLKPEDTAMYSCKAYGYDENYYAMDYWGQGTSVTVS

SEQ ID NO: 3688 - protein, 118 aa, synthetic construct
VKLEESGGGSVQAGGSLRLSCTAPGLRSNSCGMDWYRQALGKEREFVSSISPDGTTSYADSVKGRFTISKDKAKDTFYLQMNSLKPEDSAMYSCKAYGYDENYYAMDYWGQGTSVTVS

SEQ ID NO: 3689 - protein, 118 aa, synthetic construct
VKLEESGGGSVQAGGSLRLSCTAPGLRSNSCGMDWYRQALGKEREFVSSISPDGTTSYADSVKGRFTISKDKAKDTFYLQMNSLKPEDTAMYSCKAYGYDENYFPMDYWGQGTSVTVS

SEQ ID NO: 3690 - protein, 118 aa, synthetic construct
VKLEESGGGSVQAGGSLRLSCTAPGLRSNSCGMDWYRQALGKEREFVSSISPDGTTSYADSVKGRFTISKDKAKDTFYLQMNSLKPEDTAMYSCKAYGYDENYYAMDYWGQGTSVTVS

SEQ ID NO: 3691 - protein, 118 aa, synthetic construct
VKLEESGGGSVQAGGSLRLSCTAPGLRSNSCGMDWYRQALGKEREFVSSISPDGTTSYADSVKGRFTISKDKAKDTFYLQMNSLKPEDTAMYSCKAYGYDKNYYAMDYWGQGTSVTVS

SEQ ID NO: 3692 - protein, 118 aa, synthetic construct
VKLEESGGGSVQAGGSLRLSCTAPGLRSNSCGMDWYRQALGKEREFVSSISPDGTTSYADSVKGRFTISKDKAKDTFYLQMNSLKPEDTAVYSCKAYGYDENYYAMAYWGQGTSVTVS

SEQ ID NO: 3693 - protein, 118 aa, synthetic construct
VKLEESGGGSVQAGGSLRLSCTAPGLRSNSCGMDWYRQAPGKERDFVSSISADGTTSYADSVKGRFTISKDKAKDTFYLQMNSLKPEDSAMYSCKAYGYDENYYAMDYWGQGTSVTVS

SEQ ID NO: 3694 - protein, 118 aa, synthetic construct
VKLEESGGGSVQAGGSLRLSCTAPGLRSNSCGMDWYRQAPGKEREFVASISADGTTSYADSVKGRFTISKDKAKDTFYLQMNNLKPEDSAMYSCKAYGYDENYYAMDYWGQGTSVTVS

SEQ ID NO: 3695 - protein, 118 aa, synthetic construct
VKLEESGGGSVQAGGSLRLSCTAPGLRSNSCGMDWYRQAPGKEREFVASISADGTTSYADSVKGRFTISKDKAKDTFYLQMNNLKPEDTAMYLCKAYGYDENYFAMDYWGQGTSVTVS

SEQ ID NO: 3696 - protein, 118 aa, synthetic construct
VKLEESGGGSVQAGGSLRLSCTAPGLRSNSCGMDWYRQAPGKEREFVASISADGTTSYADSVKGRFTISKDKAKDTFYLQMNNLKPEDTAMYLCKAYGYDENYFPMDYWGQGTSVTVS

SEQ ID NO: 3697 - protein, 118 aa, synthetic construct
VKLEESGGGSVQAGGSLRLSCTAPGLRSNSCGMDWYRQAPGKEREFVASISADGTTSYADSVKGRFTISKDKAKDTFYLQMNNLKPEDTAMYLCKAYGYDENYYAMDYWGQGTSVTVS

SEQ ID NO: 3698 - protein, 118 aa, synthetic construct
VKLEESGGGSVQAGGSLRLSCTAPGLRSNSCGMDWYRQAPGKEREFVASISADGTTSYADSVKGRFTISKDKAKDTFYLQMNNLKPEDTAMYSCKAYGYDENYFPMDYWGQGTSVTVS

SEQ ID NO: 3699 - protein, 118 aa, synthetic construct
VKLEESGGGSVQAGGSLRLSCTAPGLRSNSCGMDWYRQAPGKEREFVASISADGTTSYADSVKGRFTISKDKAKDTFYLQMNNLKPEDTAMYSCKAYGYDENYYAMDYWGQGTSVTVS

SEQ ID NO: 3700 - protein, 118 aa, synthetic construct
VKLEESGGGSVQAGGSLRLSCTAPGLRSNSCGMDWYRQAPGKEREFVASISADGTTSYADSVKGRFTISKDKAKDTFYLQMNSLKPEDSAMYSCKAYGYDENYFPMDYWGQGTSVTVS

SEQ ID NO: 3701 - protein, 118 aa, synthetic construct
VKLEESGGGSVQAGGSLRLSCTAPGLRSNSCGMDWYRQAPGKEREFVASISADGTTSYADSVKGRFTISKDKAKDTFYLQMNSLKPEDSAMYSCKAYGYDENYYAMDYWGQGTSVTVS

SEQ ID NO: 3702 - protein, 118 aa, synthetic construct
VKLEESGGGSVQAGGSLRLSCTAPGLRSNSCGMDWYRQAPGKEREFVASISADGTTSYADSVKGRFTISKDKAKDTFYLQMNSLKPEDSAMYSCKAYGYDKNYYAMDYWGQGTSVTVS

SEQ ID NO: 3703 - protein, 118 aa, synthetic construct
VKLEESGGGSVQAGGSLRLSCTAPGLRSNSCGMDWYRQAPGKEREFVASISADGTTSYADSVKGRFTISKDKAKDTFYLQMNSLKPEDTAIYSCKAYGYDENYYARDYWGQGTSVTVS

SEQ ID NO: 3704 - protein, 118 aa, synthetic construct
VKLEESGGGSVQAGGSLRLSCTAPGLRSNSCGMDWYRQAPGKEREFVASISADGTTSYADSVKGRFTISKDKAKDTFYLQMNSLKPEDTAMYSCKAYGYDENYFPMDYWGQGTSVTVS

SEQ ID NO: 3705 - protein, 118 aa, synthetic construct
VKLEESGGGSVQAGGSLRLSCTAPGLRSNSCGMDWYRQAPGKEREFVASISADGTTSYADSVKGRFTISKDKAKDTFYLQMNSLKPEDTAMYSCKAYGYDENYYAMDYWGQGTSVTVS

SEQ ID NO: 3706 - protein, 118 aa, synthetic construct
VKLEESGGGSVQAGGSLRLSCTAPGLRSNSCGMDWYRQAPGKEREFVASISADGTTSYADSVKGRFTISKDKAKDTFYLQMNSLKPEDTAMYSCKAYGYDKNYYAMDYWGQGTSVTVS

SEQ ID NO: 3707 - protein, 118 aa, synthetic construct
VKLEESGGGSVQAGGSLRLSCTAPGLRSNSCGMDWYRQAPGKEREFVASISADGTTSYADSVKGRFTISKDKAKDTFYLQMNSLKPEDTAVYSCKAYGYDENYYAMAYWGQGTSVTVS

SEQ ID NO: 3708 - protein, 118 aa, synthetic construct
VKLEESGGGSVQAGGSLRLSCTAPGLRSNSCGMDWYRQAPGKEREFVASISRDGTTSYADSVKGRFTISKDKAKDTFYLQMNSLKPEDTAMYSCKAYGYDENYFPMDYWGQGTSVTVS

SEQ ID NO: 3709 - protein, 118 aa, synthetic construct
VKLEESGGGSVQAGGSLRLSCTAPGLRSNSCGMDWYRQAPGKEREFVSSIDRDGTTSYADSVKGRFTISKDKAKDTFYLQMNSLKPEDTAMYSCKAYGYDENYFPMDYWGQGTSVTVS

SEQ ID NO: 3710 - protein, 118 aa, synthetic construct
VKLEESGGGSVQAGGSLRLSCTAPGLRSNSCGMDWYRQAPGKEREFVSSIDRDGTTSYADSVKGRFTISKDKAKDTFYLQMNSLKPEDTAMYSCKAYGYDENYYAMDYWGQGTSVTVS

SEQ ID NO: 3711 - protein, 118 aa, synthetic construct
VKLEESGGGSVQAGGSLRLSCTAPGLRSNSCGMDWYRQAPGKEREFVSSISADGTTSYADSVKGRFTISKDKAKDTFSLQMNNLKPEDTAMYSCKAYGYDENYYAMDYWGQGTSVTVS

SEQ ID NO: 3712 - protein, 118 aa, synthetic construct
VKLEESGGGSVQAGGSLRLSCTAPGLRSNSCGMDWYRQAPGKEREFVSSISADGTTSYADSVKGRFTISKDKAKDTFYLQMNNLKPEDSAMYSCKAYGYDENYYAMDYWGQGTSVTVS

SEQ ID NO: 3713 - protein, 118 aa, synthetic construct
VKLEESGGGSVQAGGSLRLSCTAPGLRSNSCGMDWYRQAPGKEREFVSSISADGTTSYADSVKGRFTISKDKAKDTFYLQMNNLKPEDTAIYSCKAYGYDENYFPMDYWGQGTSVTVS

SEQ ID NO: 3714 - protein, 118 aa, synthetic construct
VKLEESGGGSVQAGGSLRLSCTAPGLRSNSCGMDWYRQAPGKEREFVSSISADGTTSYADSVKGRFTISKDKAKDTFYLQMNNLKPEDTAMYLCKAYGYDENYFAMAYWGQGTSVTVS

SEQ ID NO: 3715 - protein, 118 aa, synthetic construct
VKLEESGGGSVQAGGSLRLSCTAPGLRSNSCGMDWYRQAPGKEREFVSSISADGTTSYADSVKGRFTISKDKAKDTFYLQMNNLKPEDTAMYLCKAYGYDENYFAMDYWGQGTSVTVS

SEQ ID NO: 3716 - protein, 118 aa, synthetic construct
VKLEESGGGSVQAGGSLRLSCTAPGLRSNSCGMDWYRQAPGKEREFVSSISADGTTSYADSVKGRFTISKDKAKDTFYLQMNNLKPEDTAMYLCKAYGYDENYFPMDYWGQGTSVTVS

SEQ ID NO: 3717 - protein, 118 aa, synthetic construct
VKLEESGGGSVQAGGSLRLSCTAPGLRSNSCGMDWYRQAPGKEREFVSSISADGTTSYADSVKGRFTISKDKAKDTFYLQMNNLKPEDTAMYLCKAYGYDENYYAMDYWGQGTSVTVS

SEQ ID NO: 3718 - protein, 118 aa, synthetic construct
VKLEESGGGSVQAGGSLRLSCTAPGLRSNSCGMDWYRQAPGKEREFVSSISADGTTSYADSVKGRFTISKDKAKDTFYLQMNNLKPEDTAMYSCKAYGYDENYFAMDYWGQGTSVTVS

SEQ ID NO: 3719 - protein, 118 aa, synthetic construct
VKLEESGGGSVQAGGSLRLSCTAPGLRSNSCGMDWYRQAPGKEREFVSSISADGTTSYADSVKGRFTISKDKAKDTFYLQMNNLKPEDTAMYSCKAYGYDENYFPMDYWGQGTSVTVS

SEQ ID NO: 3720 - protein, 118 aa, synthetic construct
VKLEESGGGSVQAGGSLRLSCTAPGLRSNSCGMDWYRQAPGKEREFVSSISADGTTSYADSVKGRFTISKDKAKDTFYLQMNNLKPEDTAMYSCKAYGYDENYYAMAYWGQGTSVTVS

SEQ ID NO: 3721 - protein, 118 aa, synthetic construct
VKLEESGGGSVQAGGSLRLSCTAPGLRSNSCGMDWYRQAPGKEREFVSSISADGTTSYADSVKGRFTISKDKAKDTFYLQMNNLKPEDTAMYSCKAYGYDENYYAMDYWGQGTSVTVS

SEQ ID NO: 3722 - protein, 118 aa, synthetic construct
VKLEESGGGSVQAGGSLRLSCTAPGLRSNSCGMDWYRQAPGKEREFVSSISADGTTSYADSVKGRFTISKDKAKDTFYLQMNNLKPEDTAMYSCKAYGYDENYYARDYWGQGTSVTVS

SEQ ID NO: 3723 - protein, 118 aa, synthetic construct
VKLEESGGGSVQAGGSLRLSCTAPGLRSNSCGMDWYRQAPGKEREFVSSISADGTTSYADSVKGRFTISKDKAKDTFYLQMNNLKPEDTAMYSCKAYGYDENYYFMDYWGQGTSVTVS

SEQ ID NO: 3724 - protein, 118 aa, synthetic construct
VKLEESGGGSVQAGGSLRLSCTAPGLRSNSCGMDWYRQAPGKEREFVSSISADGTTSYADSVKGRFTISKDKAKDTFYLQMNNLKPEDTAMYSCKAYGYDKNYYAMDYWGQGTSVTVS

SEQ ID NO: 3725 - protein, 118 aa, synthetic construct
VKLEESGGGSVQAGGSLRLSCTAPGLRSNSCGMDWYRQAPGKEREFVSSISADGTTSYADSVKGRFTISKDKAKDTFYLQMNNLKPEDTAVYSCKAYGYDENYYAMAYWGQGTSVTVS

SEQ ID NO: 3726 - protein, 118 aa, synthetic construct
VKLEESGGGSVQAGGSLRLSCTAPGLRSNSCGMDWYRQAPGKEREFVSSISADGTTSYADSVKGRFTISKDKAKDTFYLQMNSLKPDDTAMYSCKAYGYDENYFPMDYWGQGTSVTVS

SEQ ID NO: 3727 - protein, 118 aa, synthetic construct
VKLEESGGGSVQAGGSLRLSCTAPGLRSNSCGMDWYRQAPGKEREFVSSISADGTTSYADSVKGRFTISKDKAKDTFYLQMNSLKPDDTAMYSCKAYGYDENYYAMDYWGQGTSVTVS

SEQ ID NO: 3728 - protein, 118 aa, synthetic construct
VKLEESGGGSVQAGGSLRLSCTAPGLRSNSCGMDWYRQAPGKEREFVSSISADGTTSYADSVKGRFTISKDKAKDTFYLQMNSLKPDDTAMYSCKAYGYDENYYFMDYWGQGTSVTVS

SEQ ID NO: 3729 - protein, 118 aa, synthetic construct
VKLEESGGGSVQAGGSLRLSCTAPGLRSNSCGMDWYRQAPGKEREFVSSISADGTTSYADSVKGRFTISKDKAKDTFYLQMNSLKPEDSAMYSCKAYGYDENYFAMDYWGQGTSVTVS

SEQ ID NO: 3730 - protein, 118 aa, synthetic construct
VKLEESGGGSVQAGGSLRLSCTAPGLRSNSCGMDWYRQAPGKEREFVSSISADGTTSYADSVKGRFTISKDKAKDTFYLQMNSLKPEDSAMYSCKAYGYDENYFPMDYWGQGTSVTVS

SEQ ID NO: 3731 - protein, 118 aa, synthetic construct
VKLEESGGGSVQAGGSLRLSCTAPGLRSNSCGMDWYRQAPGKEREFVSSISADGTTSYADSVKGRFTISKDKAKDTFYLQMNSLKPEDSAMYSCKAYGYDENYYAMAYWGQGTSVTVS

SEQ ID NO: 3732 - protein, 118 aa, synthetic construct
VKLEESGGGSVQAGGSLRLSCTAPGLRSNSCGMDWYRQAPGKEREFVSSISADGTTSYADSVKGRFTISKDKAKDTFYLQMNSLKPEDSAMYSCKAYGYDENYYAMDYWGQGTSVTVS

SEQ ID NO: 3733 - protein, 118 aa, synthetic construct
VKLEESGGGSVQAGGSLRLSCTAPGLRSNSCGMDWYRQAPGKEREFVSSISADGTTSYADSVKGRFTISKDKAKDTFYLQMNSLKPEDSAMYSCKAYGYDENYYFMDYWGQGTSVTVS

SEQ ID NO: 3734 - protein, 118 aa, synthetic construct
VKLEESGGGSVQAGGSLRLSCTAPGLRSNSCGMDWYRQAPGKEREFVSSISADGTTSYADSVKGRFTISKDKAKDTFYLQMNSLKPEDSAMYSCKAYGYDKNYYAMDYWGQGTSVTVS

SEQ ID NO: 3735 - protein, 118 aa, synthetic construct
VKLEESGGGSVQAGGSLRLSCTAPGLRSNSCGMDWYRQAPGKEREFVSSISADGTTSYADSVKGRFTISKDKAKDTFYLQMNSLKPEDTAIYSCKAYGYDENYYARDYWGQGTSVTVS

SEQ ID NO: 3736 - protein, 118 aa, synthetic construct
VKLEESGGGSVQAGGSLRLSCTAPGLRSNSCGMDWYRQAPGKEREFVSSISADGTTSYADSVKGRFTISKDKAKDTFYLQMNSLKPEDTAMYLCKAYGYDENYFAMDYWGQGTSVTVS

SEQ ID NO: 3737 - protein, 118 aa, synthetic construct
VKLEESGGGSVQAGGSLRLSCTAPGLRSNSCGMDWYRQAPGKEREFVSSISADGTTSYADSVKGRFTISKDKAKDTFYLQMNSLKPEDTAMYLCKAYGYDENYYAMDYWGQGTSVTVS

SEQ ID NO: 3738 - protein, 118 aa, synthetic construct
VKLEESGGGSVQAGGSLRLSCTAPGLRSNSCGMDWYRQAPGKEREFVSSISADGTTSYADSVKGRFTISKDKAKDTFYLQMNSLKPEDTAMYSCKAYGYDENYFAMDYWGQGTSVTVS

SEQ ID NO: 3739 - protein, 118 aa, synthetic construct
VKLEESGGGSVQAGGSLRLSCTAPGLRSNSCGMDWYRQAPGKEREFVSSISADGTTSYADSVKGRFTISKDKAKDTFYLQMNSLKPEDTAMYSCKAYGYDENYFPMDYWGQGTSVTVS

SEQ ID NO: 3740 - protein, 118 aa, synthetic construct
VKLEESGGGSVQAGGSLRLSCTAPGLRSNSCGMDWYRQAPGKEREFVSSISADGTTSYADSVKGRFTISKDKAKDTFYLQMNSLKPEDTAMYSCKAYGYDENYYAMAYWGQGTSVTVS

SEQ ID NO: 3741 - protein, 118 aa, synthetic construct
VKLEESGGGSVQAGGSLRLSCTAPGLRSNSCGMDWYRQAPGKEREFVSSISADGTTSYADSVKGRFTISKDKAKDTFYLQMNSLKPEDTAMYSCKAYGYDENYYAMDYWGQGTSVTVS

SEQ ID NO: 3742 - protein, 118 aa, synthetic construct
VKLEESGGGSVQAGGSLRLSCTAPGLRSNSCGMDWYRQAPGKEREFVSSISADGTTSYADSVKGRFTISKDKAKDTFYLQMNSLKPEDTAMYSCKAYGYDENYYARDYWGQGTSVTVS

SEQ ID NO: 3743 - protein, 118 aa, synthetic construct
VKLEESGGGSVQAGGSLRLSCTAPGLRSNSCGMDWYRQAPGKEREFVSSISADGTTSYADSVKGRFTISKDKAKDTFYLQMNSLKPEDTAMYSCKAYGYDENYYFMDYWGQGTSVTVS

SEQ ID NO: 3744 - protein, 118 aa, synthetic construct
VKLEESGGGSVQAGGSLRLSCTAPGLRSNSCGMDWYRQAPGKEREFVSSISADGTTSYADSVKGRFTISKDKAKDTFYLQMNSLKPEDTAMYSCKAYGYDKNYFPMDYWGQGTSVTVS

SEQ ID NO: 3745 - protein, 118 aa, synthetic construct
VKLEESGGGSVQAGGSLRLSCTAPGLRSNSCGMDWYRQAPGKEREFVSSISADGTTSYADSVKGRFTISKDKAKDTFYLQMNSLKPEDTAMYSCKAYGYDKNYYAMDYWGQGTSVTVS

SEQ ID NO: 3746 - protein, 114 aa, synthetic construct
VKLEESGGGSVQAGGSLRLSCTAPGLRSNSCGMDWYRQAPGKEREFVSSISADGTTSYADSVKGRFTISKDKAKDTFYLQMNSLKPEDTAMYYCASLWLRRLVCWGQGTLVTVS

SEQ ID NO: 3747 - protein, 118 aa, synthetic construct
VKLEESGGGSVQAGGSLRLSCTAPGLRSNSCGMDWYRQAPGKEREFVSSISADGTTSYADSVKGRFTISKDKAKDTFYLQMNSLKPEDTAVYSCKAYGYDENYFPMDYWGQGTSVTVS

SEQ ID NO: 3748 - protein, 118 aa, synthetic construct
VKLEESGGGSVQAGGSLRLSCTAPGLRSNSCGMDWYRQAPGKEREFVSSISADGTTSYADSVKGRFTISKDKAKDTFYLQMNSLKPEDTAVYSCKAYGYDENYYAMAYWGQGTSVTVS

SEQ ID NO: 3749 - protein, 118 aa, synthetic construct
VKLEESGGGSVQAGGSLRLSCTAPGLRSNSCGMDWYRQAPGKEREFVSSISADGTTSYADSVKGRFTISKDKAKDTFYLQMNSLKPEDTAVYSCKAYGYDENYYAMDYWGQGTSVTVS

SEQ ID NO: 3750 - protein, 118 aa, synthetic construct
VKLEESGGGSVQAGGSLRLSCTAPGLRSNSCGMDWYRQAPGKEREFVSSISADGTTSYADSVKGRFTISKDKAKDTFYLQMNSLKPEDTAVYSCKAYGYDENYYARDYWGQGTSVTVS

SEQ ID NO: 3751 - protein, 118 aa, synthetic construct
VKLEESGGGSVQAGGSLRLSCTAPGLRSNSCGMDWYRQAPGKEREFVSSISADGTTSYADSVKGRFTISKDKAKDTFYLQMNSLKPEDTAVYSCKAYGYDKNYYAMDYWGQGTSVTVS

SEQ ID NO: 3752 - protein, 118 aa, synthetic construct
VKLEESGGGSVQAGGSLRLSCTAPGLRSNSCGMDWYRQAPGKEREFVSSISADGTTSYADSVKGRFTISKDKAKDTVYLQMNSLKPEDTAMYSCKAYGYDENYYAMDYWGQGTSVTVS

SEQ ID NO: 3753 - protein, 118 aa, synthetic construct
VKLEESGGGSVQAGGSLRLSCTAPGLRSNSCGMDWYRQAPGKEREFVSSISPDGTTSYADSVKGRFTISKDKAKDTFYLQMNNLKPEDTAMYSCKAYGYDENYYAMDYWGQGTSVTVS

SEQ ID NO: 3754 - protein, 118 aa, synthetic construct
VKLEESGGGSVQAGGSLRLSCTAPGLRSNSCGMDWYRQAPGKEREFVSSISPDGTTSYADSVKGRFTISKDKAKDTFYLQMNSLKPDDTAMYSCKAYGYDENYFPMDYWGQGTSVTVS

SEQ ID NO: 3755 - protein, 118 aa, synthetic construct
VKLEESGGGSVQAGGSLRLSCTAPGLRSNSCGMDWYRQAPGKEREFVSSISPDGTTSYADSVKGRFTISKDKAKDTFYLQMNSLKPEDSAMYSCKAYGYDENYFPMDYWGQGTSVTVS

SEQ ID NO: 3756 - protein, 118 aa, synthetic construct
VKLEESGGGSVQAGGSLRLSCTAPGLRSNSCGMDWYRQAPGKEREFVSSISPDGTTSYADSVKGRFTISKDKAKDTFYLQMNSLKPEDSAMYSCKAYGYDENYYAMDYWGQGTSVTVS

SEQ ID NO: 3757 - protein, 118 aa, synthetic construct
VKLEESGGGSVQAGGSLRLSCTAPGLRSNSCGMDWYRQAPGKEREFVSSISPDGTTSYADSVKGRFTISKDKAKDTFYLQMNSLKPEDTAIYSCRAYGYDENYSAVDYWGQGTSVTVS

SEQ ID NO: 3758 - protein, 118 aa, synthetic construct
VKLEESGGGSVQAGGSLRLSCTAPGLRSNSCGMDWYRQAPGKEREFVSSISPDGTTSYADSVKGRFTISKDKAKDTFYLQMNSLKPEDTAMYSCKAYGYDENYFPMDYWGQGTSVTVS

SEQ ID NO: 3759 - protein, 118 aa, synthetic construct
VKLEESGGGSVQAGGSLRLSCTAPGLRSNSCGMDWYRQAPGKEREFVSSISPDGTTSYADSVKGRFTISKDKAKDTFYLQMNSLKPEDTAMYSCKAYGYDENYYAMDYWGQGTSVTVS

SEQ ID NO: 3760 - protein, 118 aa, synthetic construct
VKLEESGGGSVQAGGSLRLSCTAPGLRSNSCGMDWYRQAPGKEREFVSSISPDGTTSYADSVKGRFTISKDKAKDTFYLQMNSLKPEDTAMYSCKAYGYDKNYYAMDYWGQGTSVTVS

SEQ ID NO: 3761 - protein, 118 aa, synthetic construct
VKLEESGGGSVQAGGSLRLSCTAPGLRSNSCGMDWYRQAPGKEREFVSSISPDGTTSYADSVKGRFTISKDKAKDTFYLQMNSLKPEDTAVYSCKAYGYDENYYAMAYWGQGTSVTVS

SEQ ID NO: 3762 - protein, 118 aa, synthetic construct
VKLEESGGGSVQAGGSLRLSCTAPGLRSNSCGMDWYRQAPGKEREFVSSISRDGTTSYADSVKGRFTISKDKAKDTFYLQMNNLKPEDTAMYSCKAYGYDENYYAMDYWGQGTSVTVS

SEQ ID NO: 3763 - protein, 118 aa, synthetic construct
VKLEESGGGSVQAGGSLRLSCTAPGLRSNSCGMDWYRQAPGKEREFVSSISRDGTTSYADSVKGRFTISKDKAKDTFYLQMNSLKPEDSAMYSCKAYGYDENYYAMDYWGQGTSVTVS

SEQ ID NO: 3764 - protein, 118 aa, synthetic construct
VKLEESGGGSVQAGGSLRLSCTAPGLRSNSCGMDWYRQAPGKEREFVSSISRDGTTSYADSVKGRFTISKDKAKDTFYLQMNSLKPEDTAMYSCKAYGYDENYYAMDYWGQGTSVTVS

SEQ ID NO: 3765 - protein, 118 aa, synthetic construct
VKLEESGGGSVQAGGSLRLSCTAPGLRSNSCGMDWYRQAPGKEREFVSSISTDGTISYADSVKGRFTISKDKAKDTFYLQMNNLKPEDTAMYSCKAYGYDENYFPMDYWGQGTSVTVS

SEQ ID NO: 3766 - protein, 118 aa, synthetic construct
VKLEESGGGSVQAGGSLRLSCTAPGLRSNSWGMDWYRQAPGKEREFVSSISADGTTSYADSVKGRFTISKDKAKDTFYLQMNSLKPEDTAVYSCKAYGYDENYYAMAYWGQGTSVTVS

SEQ ID NO: 3767 - protein, 118 aa, synthetic construct
VKLEESGGGSVQAGGSLRLTCTAPGFRSNSCGMDWYRQAPGKEREFVASISADGTTSYADSVKGRFTISKDKAKDTFYLQMNNLKPEDTAMYLCKAYGYDENYFAMDYWGQGTSVTVS

SEQ ID NO: 3768 - protein, 118 aa, synthetic construct
VKLEESGGGSVQAGGSLRLTCTAPGFRSNSCGMDWYRQAPGKEREFVASISADGTTSYADSVKGRFTISKDKAKDTFYLQMNNLKPEDTAMYSCKAYGYDENYYAMDYWGQGTSVTVS

SEQ ID NO: 3769 - protein, 118 aa, synthetic construct
VKLEESGGGSVQAGGSLRLTCTAPGFRSNSCGMDWYRQAPGKEREFVASISADGTTSYADSVKGRFTISKDKAKDTFYLQMNSLKPEDTAMYSCKAYGYDENYYAMDYWGQGTSVTVS

SEQ ID NO: 3770 - protein, 118 aa, synthetic construct
VKLEESGGGSVQAGGSLRLTCTAPGFRSNSCGMDWYRQAPGKEREFVSSIDRDGTTSYADSVKGRFTISKDKAKDTFYLQMNSLKPEDTAMYSCKAYGYDENYFPMDYWGQGTSVTVS

SEQ ID NO: 3771 - protein, 118 aa, synthetic construct
VKLEESGGGSVQAGGSLRLTCTAPGFRSNSCGMDWYRQAPGKEREFVSSISADGTTSYADSVKGRFTISKDKAKDTFYLQMNNLKPEDTAMYSCKAYGYDENYYAMDYWGQGTSVTVS

SEQ ID NO: 3772 - protein, 118 aa, synthetic construct
VKLEESGGGSVQAGGSLRLTCTAPGFRSNSCGMDWYRQAPGKEREFVSSISADGTTSYADSVKGRFTISKDKAKDTFYLQMNSLKPDDTAMYSCKAYGYDENYYAMDYWGQGTSVTVS

SEQ ID NO: 3773 - protein, 118 aa, synthetic construct
VKLEESGGGSVQAGGSLRLTCTAPGFRSNSCGMDWYRQAPGKEREFVSSISADGTTSYADSVKGRFTISKDKAKDTFYLQMNSLKPEDSAMYSCKAYGYDENYYAMDYWGQGTSVTVS

SEQ ID NO: 3774 - protein, 118 aa, synthetic construct
VKLEESGGGSVQAGGSLRLTCTAPGFRSNSCGMDWYRQAPGKEREFVSSISADGTTSYADSVKGRFTISKDKAKDTFYLQMNSLKPEDTAMYSCKAYGYDENYFPMDYWGQGTSVTVS

SEQ ID NO: 3775 - protein, 118 aa, synthetic construct
VKLEESGGGSVQAGGSLRLTCTAPGFRSNSCGMDWYRQAPGKEREFVSSISADGTTSYADSVKGRFTISKDKAKDTFYLQMNSLKPEDTAMYSCKAYGYDENYYAMDYWGQGTSVTVS

SEQ ID NO: 3776 - protein, 118 aa, synthetic construct
VKLEESGGGSVQAGGSLRLTCTAPGFRSNSCGMDWYRQAPGKEREFVSSISADGTTSYADSVKGRFTISKDKAKDTFYLQMNSLKPEDTAVYSCKAYGYDENYYAMAYWGQGTSVTVS

SEQ ID NO: 3777 - protein, 118 aa, synthetic construct
VKLEESGGGSVQAGGSLRLTCTAPGFRSNSCGMDWYRQAPGKEREFVSSISPDGTTSYADSVKGRFTISKDKAKDTFYLQMNNLKPEDTAMYLCKAYGYDENYFAMDYWGQGTSVTVS

SEQ ID NO: 3778 - protein, 118 aa, synthetic construct
VKLEESGGGSVQAGGSLRLTCTAPGFRSNSCGMDWYRQAPGKEREFVSSISPDGTTSYADSVKGRFTISKDKAKDTFYLQMNNLKPEDTAMYSCKAYGYDENYFPMDYWGQGTSVTVS

SEQ ID NO: 3779 - protein, 118 aa, synthetic construct
VKLEESGGGSVQAGGSLRLTCTAPGFRSNSCGMDWYRQAPGKEREFVSSISPDGTTSYADSVKGRFTISKDKAKDTFYLQMNNLKPEDTAMYSCKAYGYDENYYAMDYWGQGTSVTVS

SEQ ID NO: 3780 - protein, 118 aa, synthetic construct
VKLEESGGGSVQAGGSLRLTCTAPGFRSNSCGMDWYRQAPGKEREFVSSISPDGTTSYADSVKGRFTISKDKAKDTFYLQMNSLKPEDTAMYSCKAYGYDENYFPMDYWGQGTSVTVS

SEQ ID NO: 3781 - protein, 118 aa, synthetic construct
VKLEESGGGSVQAGGSLRLTCTAPGFRSNSCGMDWYRQAPGKEREFVSSISPDGTTSYADSVKGRFTISKDKAKDTFYLQMNSLKPEDTAMYSCKAYGYDENYYAMDYWGQGTSVTVS

SEQ ID NO: 3782 - protein, 118 aa, synthetic construct
VKLEESGGGSVQAGGSLRLTCTAPGFRSNSCGMDWYRQAPGKEREFVSSISPDGTTSYADSVKGRFTISKDKAKDTFYLQMNSLKPEDTAMYSCKAYGYDKNYYAMDYWGQGTSVTVS

SEQ ID NO: 3783 - protein, 118 aa, synthetic construct
VKLEESGGGSVQAGGSLRLTCTAPGFRSNSCGMDWYRQAPGKEREFVSSISPDGTTSYADSVKGRFTISKDKAKDTFYLQMNSLKPEDTAVYSCKAYGYDENYYAMAYWGQGTSVTVS

SEQ ID NO: 3784 - protein, 118 aa, synthetic construct
VKLEESGGGSVQAGGSLRLTCTAPGLRSNSCGMDWYRQAPGKEREFVSSISADGTTSYADSVKGRFTISKDKAKDTFYLQMNNLKPEDTAMYSCKAYGYDENYFPMDYWGQGTSVTVS

SEQ ID NO: 3785 - protein, 118 aa, synthetic construct
VKLEESGGGSVQAGGSLRLTCTAPGLRSNSCGMDWYRQAPGKEREFVSSISADGTTSYADSVKGRFTISKDKAKDTFYLQMNNLKPEDTAMYSCKAYGYDENYYAMDYWGQGTSVTVS

SEQ ID NO: 3786 - protein, 118 aa, synthetic construct
VKLEESGGGSVQAGGSLRLTCTAPGLRSNSCGMDWYRQAPGKEREFVSSISADGTTSYADSVKGRFTISKDKAKDTFYLQMNSLKPEDSAMYSCKAYGYDENYYAMDYWGQGTSVTVS

SEQ ID NO: 3787 - protein, 118 aa, synthetic construct
VKLEESGGGSVQAGGSLRLTCTAPGLRSNSCGMDWYRQAPGKEREFVSSISADGTTSYADSVKGRFTISKDKAKDTFYLQMNSLKPEDTAMYSCKAYGYDENYFPMDYWGQGTSVTVS

SEQ ID NO: 3788 - protein, 118 aa, synthetic construct
VKLEESGGGSVQAGGSLRLTCTAPGLRSNSCGMDWYRQAPGKEREFVSSISADGTTSYADSVKGRFTISKDKAKDTFYLQMNSLKPEDTAMYSCKAYGYDENYYAMDYWGQGTSVTVS

SEQ ID NO: 3789 - protein, 118 aa, synthetic construct
VKLEESGGGSVQAGGSLRLTCTAPGLRSNSCGMDWYRQAPGKEREFVSSISADGTTSYADSVKGRFTISKDKAKDTFYLQMNSLKPEDTAVYSCKAYGYDENYYAMAYWGQGTSVTVS

SEQ ID NO: 3790 - protein, 118 aa, synthetic construct
VKLEESGGGSVQTGGSLRLSCTAPGLRSNSCGMDWYRQAPGKEREFVSSISADGTTSYADSVKGRFTISKDKAKDTFYLQMNNLKPEDTAMYSCKAYGYDENYYAMDYWGQGTSVTVS

SEQ ID NO: 3791 - protein, 118 aa, synthetic construct
VKLEESGGGSVQTGGSLRLSCTAPGLRSNSCGMDWYRQAPGKEREFVSSISADGTTSYADSVKGRFTISKDKAKDTFYLQMNSLKPEDSAMYSCKAYGYDENYFPMDYWGQGTSVTVS

SEQ ID NO: 3792 - protein, 118 aa, synthetic construct
VKLEESGGGSVQTGGSLRLSCTAPGLRSNSCGMDWYRQAPGKEREFVSSISADGTTSYADSVKGRFTISKDKAKDTFYLQMNSLKPEDSAMYSCKAYGYDENYYAMDYWGQGTSVTVS

SEQ ID NO: 3793 - protein, 118 aa, synthetic construct
VKLEESGGGSVQTGGSLRLSCTAPGLRSNSCGMDWYRQAPGKEREFVSSISADGTTSYADSVKGRFTISKDKAKDTFYLQMNSLKPEDTAMYSCKAYGYDENYFPMDYWGQGTSVTVS

SEQ ID NO: 3794 - protein, 118 aa, synthetic construct
VKLEESGGGSVQTGGSLRLSCTAPGLRSNSCGMDWYRQAPGKEREFVSSISADGTTSYADSVKGRFTISKDKAKDTFYLQMNSLKPEDTAMYSCKAYGYDENYYAMDYWGQGTSVTVS

SEQ ID NO: 3795 - protein, 118 aa, synthetic construct
VKLEESGGGSVQTGGSLRLSCTAPGLRSNSCGMDWYRQAPGKEREFVSSISADGTTSYADSVKGRFTISKDKAKDTFYLQMNSLKPEDTAVYSCKAYGYDENYYAMAYWGQGTSVTVS

SEQ ID NO: 3796 - protein, 118 aa, synthetic construct
VKLEESGGGSVQTGGSLRLTCTAPGFRSNSCGMDWYRQAPGKEREFVSSISPDGTTSYADSVKGRFTISKDKAKDTFYLQMNSLKPEDTAMYSCKAYGYDKNYYAMDYWGQGTSVTVS

SEQ ID NO: 3797 - protein, 115 aa, synthetic construct
EVQLVESGGGSVEAGGSLRLSCTASGFTFDDSDMGWYRQAPGNECELVSTISSDGSAYYADSVKGRFTISQDNAKNTVYLQMNSLKPEDTAMYYCASLWLRRLVCWGQGTLVTVS

SEQ ID NO: 3798 - protein, 115 aa, synthetic construct
EVQLVESGGGSVEAGGSLRLSCTASGFTFDDSDMGWYRQAPGNECELVSTVSSDGRTLYADSVKGRFTISQDNAKNTIYLQMNSLKPEDTAMYYCASLWLRRLVCWGQGTLVTVS

SEQ ID NO: 3799 - protein, 115 aa, synthetic construct
EVQLVESGGGSVEAGGSLRLSCTASGFTFDDSDMGWYRQAPGNECELVSTVSSDGRTLYADSVKGRFTISQDNAKNTVYLQMNSLKPEDTAMYYCASLWLRRLVCWGQGTLVTVS

SEQ ID NO: 3800 - protein, 115 aa, synthetic construct
EVQLVESGGGSVEAGGSLRLSCTASGFTFDDSDMGWYRQAPGNECELVSTVSSDGRTLYADSVKGRFTISQDNAKNTVYLQMNSLKPEDTAVYYCASLWLRRLVCWGQGTLVTVS

SEQ ID NO: 3801 - protein, 115 aa, synthetic construct
EVQLVESGGGSVEAGGSLRLSCTASGFTFDDSDMGWYRQAPGNERELVATISSDGSAYYADSVKGRFTISQDNAKNTVYLQMNSLKPEDTAMYYCASLWLRRLVCWGQGTLVTVS

SEQ ID NO: 3802 - protein, 115 aa, synthetic construct
EVQLVESGGGSVEAGGSLRLSCTASGFTFDDSDMGWYRQAPGNERELVSTIFSDGGTYYADSVKGRFTISQDNAKNTIYLQMNSLKPEDTAMYYCASLWLRRLVCWGQGTLVTVS

SEQ ID NO: 3803 - protein, 115 aa, synthetic construct
EVQLVESGGGSVEAGGSLRLSCTASGFTFDDSDMGWYRQAPGNERELVSTIFSDGGTYYADSVKGRFTISQDNAKNTVYLQMNSLKPEDTAMYYCASLWLRRLVCWGQGTLVTVS

SEQ ID NO: 3804 - protein, 115 aa, synthetic construct
EVQLVESGGGSVEAGGSLRLSCTASGFTFDDSDMGWYRQAPGNERELVSTIFSDGGTYYADSVKGRFTISQDNAKNTVYLQMNSLKPEDTAVYYCASLWLRRLVCWGQGTLVTVS

SEQ ID NO: 3805 - protein, 115 aa, synthetic construct
EVQLVESGGGSVEAGGSLRLSCTASGFTFDDSDMGWYRQAPGNERELVSTIRSDGGTYYADSVKGRFTISQDNAKNTVYLQMNSLKPEDTAMYYCASLWLRRLVCWGQGTLVTVS

SEQ ID NO: 3806 - protein, 115 aa, synthetic construct
EVQLVESGGGSVEAGGSLRLSCTASGFTFDDSDMGWYRQAPGNERELVSTISSDGSAYYADSVKGRFSISQDNAKNTIYLQMNSLKPEDTAMYYCASLWLRRLVCWGQGTLVTVS

SEQ ID NO: 3807 - protein, 115 aa, synthetic construct
EVQLVESGGGSVEAGGSLRLSCTASGFTFDDSDMGWYRQAPGNERELVSTISSDGSAYYADSVKGRFSISQDNAKNTVYLQMNSLKPEDTAMYYCASLWLRRLVCWGQGTLVTVS

SEQ ID NO: 3808 - protein, 115 aa, synthetic construct
EVQLVESGGGSVEAGGSLRLSCTASGFTFDDSDMGWYRQAPGNERELVSTISSDGSAYYADSVKGRFTISQDNAKNTIYLQMNSLKPEDTAMYYCASLWLRRLVCWGQGTLVTVS

SEQ ID NO: 3809 - protein, 115 aa, synthetic construct
EVQLVESGGGSVEAGGSLRLSCTASGFTFDDSDMGWYRQAPGNERELVSTISSDGSAYYADSVKGRFTISQDNAKNTVYLQMNSLKPEDTAMYYCASLWLRRLVCWGQGTLVTVS

SEQ ID NO: 3810 - protein, 115 aa, synthetic construct
EVQLVESGGGSVEAGGSLRLSCTASGFTFDDSDMGWYRQAPGNERELVSTISSDGSAYYADSVKGRFTISQDNAKNTVYLQMNSLKPEDTAVYYCASLWLRRLVCWGQGTLVTVS

SEQ ID NO: 3811 - protein, 115 aa, synthetic construct
EVQLVESGGGSVEAGGSLRLSCTASGFTFDDSDMGWYRQAPGNERELVSTISSDGSTYYADSVKGRFTISQDNAKNTIYLQMNSLKPEDTAMYYCASLWLRRLVCWGQGTLVTVS

SEQ ID NO: 3812 - protein, 115 aa, synthetic construct
EVQLVESGGGSVEAGGSLRLSCTASGFTFDDSDMGWYRQAPGNERELVSTVSSDGRTLYADSVKGRFTISQDNAKNTIYLQMNSLKPEDTAMYYCASLWLRRLVCWGQGTLVTVS

SEQ ID NO: 3813 - protein, 115 aa, synthetic construct
EVQLVESGGGSVEAGGSLRLSCTASGFTFDDSDMGWYRQAPGNERELVSTVSSDGRTLYADSVKGRFTISQDNAKNTVYLQMNSLKPEDTAMYYCASLWLRRLVCWGQGTLVTVS

SEQ ID NO: 3814 - protein, 115 aa, synthetic construct
EVQLVESGGGSVEAGGSLRLSCTASGFTFDDSDMGWYRQARGNERELVSTIFSDGGTYYADSVKGRFTISQDNAKNTVYLQMNSLKPEDTAMYYCASLWLRRLVCWGQGTLVTVS

SEQ ID NO: 3815 - protein, 115 aa, synthetic construct
EVQLVESGGGSVEAGGSLRLSCTASGFTFDDSDMGWYRQARGNERELVSTISSDGSAYYADSVKGRFTISQDNAKNTVYLQMNSLKPEDTAMYYCASLWLRRLVCWGQGTLVTVS

SEQ ID NO: 3816 - protein, 115 aa, synthetic construct
EVQLVESGGGSVEAGGSLRLSCTASGFTFDDSDMGWYRQARGNERELVSTISSDGSTYYADSVKGRFTISQDNAKNTVYLQMNSLKPEDTAMYYCASLWLRRLVCWGQGTLVTVS

SEQ ID NO: 3817 - protein, 115 aa, synthetic construct
EVQLVESGGGSVEAGGSLRLSCTASGFTFDVSDMGWYRQAPGNECELVSTVSSDGRTLYADSVKGRFTISQDNAKNTIYLQMNSLKPEDTAMYYCASLWLRRLVCWGQGTLVTVS

SEQ ID NO: 3818 - protein, 115 aa, synthetic construct
EVQLVESGGGSVEAGGSLRLSCTASGFTFDVSDMGWYRQAPGNERELVATISSDGSAYYADSVKGRFTISQDNAKNTVYLQMNSLKPEDTAMYYCASLWLRRLVCWGQGTLVTVS

SEQ ID NO: 3819 - protein, 115 aa, synthetic construct
EVQLVESGGGSVEAGGSLRLSCTASGFTFDVSDMGWYRQAPGNERELVSTISSDGSAYYADSVKGRFSISQDNAKNTVYLQMNSLKPEDTAMYYCASLWLRRLVCWGQGTLVTVS

SEQ ID NO: 3820 - protein, 115 aa, synthetic construct
EVQLVESGGGSVEAGGSLRLSCTASGFTFDVSDMGWYRQAPGNERELVSTISSDGSAYYADSVKGRFTISQDNAKNTIYLQMNSLKPEDTAMYYCASLWLRRLVCWGQGTLVTVS

SEQ ID NO: 3821 - protein, 115 aa, synthetic construct
EVQLVESGGGSVEAGGSLRLSCTASGFTFDVSDMGWYRQAPGNERELVSTISSDGSAYYADSVKGRFTISQDNAKNTVYLQMNSLKPEDTAMYYCASLWLRRLVCWGQGTLVTVS

SEQ ID NO: 3822 - protein, 115 aa, synthetic construct
EVQLVESGGGSVEAGGSLRLSCTASGFTFDVSDMGWYRQAPGNERELVSTISSDGSAYYADSVKGRFTISQDNAKNTVYLQMNSLKPEDTAVYYCASLWLRRLVCWGQGTLVTVS

SEQ ID NO: 3823 - protein, 115 aa, synthetic construct
EVQLVESGGGSVEAGGSLRLSCTASGFTFDVSDMGWYRQARGNERELVSTISSDGSTYYADSVKGRFTISQDNAKNTVYLQMNSLKPEDTAMYYCASLWLRRLVCWGQGTLVTVS

SEQ ID NO: 3824 - protein, 115 aa, synthetic construct
EVQLVESGGGSVQAGGSLRLSCTASGFTFDDSDMGWYRQAPGNECELVSTIFSDGGTYYADSVKGRFTISQDNAKNTVYLQMNSLKPEDTAVYYCASLWLRRLVCWGQGTLVTVS

SEQ ID NO: 3825 - protein, 115 aa, synthetic construct
EVQLVESGGGSVQAGGSLRLSCTASGFTFDDSDMGWYRQAPGNECELVSTISSDGSAYYADSVKGRFTISQDNAKNTIYLQMNSLKPEDTAMYYCASLWLRRLVCWGQGTLVTVS

SEQ ID NO: 3826 - protein, 115 aa, synthetic construct
EVQLVESGGGSVQAGGSLRLSCTASGFTFDDSDMGWYRQAPGNECELVSTISSDGSAYYADSVKGRFTISQDNAKNTVYLQMNSLKPEDTAMYYCASLWLRRLVCWGQGTLVTVS

SEQ ID NO: 3827 - protein, 115 aa, synthetic construct
EVQLVESGGGSVQAGGSLRLSCTASGFTFDDSDMGWYRQAPGNECELVSTISSDGSTYYADSVKGRFTISQDNAKNTIYLQMNSLKPEDTAMYYCASLWLRRLVCWGQGTLVTVS

SEQ ID NO: 3828 - protein, 115 aa, synthetic construct
EVQLVESGGGSVQAGGSLRLSCTASGFTFDDSDMGWYRQAPGNECELVSTVSSDGRTLYADSVKGRFSISQDNAKNTVYLQMNSLKPEDTAMYYCASLWLRRLVCWGQGTLVTVS

SEQ ID NO: 3829 - protein, 115 aa, synthetic construct
EVQLVESGGGSVQAGGSLRLSCTASGFTFDDSDMGWYRQAPGNECELVSTVSSDGRTLYADSVKGRFTISQDNAKNTIYLQMNSLKPEDTAMYYCASLWLRRLVCWGPGTLVTVS

SEQ ID NO: 3830 - protein, 115 aa, synthetic construct
EVQLVESGGGSVQAGGSLRLSCTASGFTFDDSDMGWYRQAPGNECELVSTVSSDGRTLYADSVKGRFTISQDNAKNTIYLQMNSLKPEDTAMYYCASLWLRRLVCWGQGTLVTVS

SEQ ID NO: 3831 - protein, 115 aa, synthetic construct
EVQLVESGGGSVQAGGSLRLSCTASGFTFDDSDMGWYRQAPGNECELVSTVSSDGRTLYADSVKGRFTISQDNAKNTIYLQMNSLKPEDTAVYYCASLWLRRLVCWGQGTLVTVS

SEQ ID NO: 3832 - protein, 115 aa, synthetic construct
EVQLVESGGGSVQAGGSLRLSCTASGFTFDDSDMGWYRQAPGNECELVSTVSSDGRTLYADSVKGRFTISQDNAKNTVYLQMNSLKPEDTAMYYCASLWLRRLVCWGQGTLVTVS

SEQ ID NO: 3833 - protein, 115 aa, synthetic construct
EVQLVESGGGSVQAGGSLRLSCTASGFTFDDSDMGWYRQAPGNECELVSTVSSDGRTLYADSVKGRFTISQDNAKNTVYLQMNSLKPEDTAVYYCASLWLRRLVCWGQGTLVTVS

SEQ ID NO: 3834 - protein, 115 aa, synthetic construct
EVQLVESGGGSVQAGGSLRLSCTASGFTFDDSDMGWYRQAPGNECELVSTVSSDGSAYYADSVKGRFTISQDNAKNTIYLQMNSLKPEDTAMYYCASLWLRRLVCWGQGTLVTVS

SEQ ID NO: 3835 - protein, 115 aa, synthetic construct
EVQLVESGGGSVQAGGSLRLSCTASGFTFDDSDMGWYRQAPGNECELVSTVSSDGSAYYADSVKGRFTISQDNAKNTVYLQMNSLKPEDTAMYYCASLWLRRLVCWGQGTLVTVS

SEQ ID NO: 3836 - protein, 115 aa, synthetic construct
EVQLVESGGGSVQAGGSLRLSCTASGFTFDDSDMGWYRQAPGNERELVATIRSDGRTLYADSVKGRFTISQDNAKNTIYLQMNSLKPEDTAMYYCASLWLRRLVCWGQGTLVTVS

SEQ ID NO: 3837 - protein, 115 aa, synthetic construct
EVQLVESGGGSVQAGGSLRLSCTASGFTFDDSDMGWYRQAPGNERELVSTIFSDGGTYYADSVKGRFSISQDNAKNTVYLQMNSLKPEDTAMYYCASLWLRRLVCWGQGTLVTVS

SEQ ID NO: 3838 - protein, 115 aa, synthetic construct
EVQLVESGGGSVQAGGSLRLSCTASGFTFDDSDMGWYRQAPGNERELVSTIFSDGGTYYADSVKGRFTISQDNAKNTIYLQMNSLKPEDTAMYYCASLWLRRLVCWGQGTLVTVS

SEQ ID NO: 3839 - protein, 115 aa, synthetic construct
EVQLVESGGGSVQAGGSLRLSCTASGFTFDDSDMGWYRQAPGNERELVSTIFSDGGTYYADSVKGRFTISQDNAKNTVYLQMNSLKPEDTAMYYCASLWLRRLVCWGQGTLVTVS

SEQ ID NO: 3840 - protein, 115 aa, synthetic construct
EVQLVESGGGSVQAGGSLRLSCTASGFTFDDSDMGWYRQAPGNERELVSTIFSDGGTYYADSVKGRFTISQDNAKNTVYLQMNSLKPEDTAVYYCASLWLRRLVCWGQGTLVTVS

SEQ ID NO: 3841 - protein, 115 aa, synthetic construct
EVQLVESGGGSVQAGGSLRLSCTASGFTFDDSDMGWYRQAPGNERELVSTIFSDGRTLYADSVKGRFTISQDNAKNTIYLQMNSLKPEDTAMYYCASLWLRRLVCWGQGTLVTVS

SEQ ID NO: 3842 - protein, 115 aa, synthetic construct
EVQLVESGGGSVQAGGSLRLSCTASGFTFDDSDMGWYRQAPGNERELVSTIFSDGSAYYADSVKGRFTISQDNAKNTVYLQMNSLKPEDTAMYYCASLWLRRLVCWGQGTLVTVS

SEQ ID NO: 3843 - protein, 115 aa, synthetic construct
EVQLVESGGGSVQAGGSLRLSCTASGFTFDDSDMGWYRQAPGNERELVSTIFSDGSTYYADSVKGRFTISQDNAKNTVYLQMNSLKPEDTAMYYCASLWLRRLVCWGQGTLVTVS

SEQ ID NO: 3844 - protein, 115 aa, synthetic construct
EVQLVESGGGSVQAGGSLRLSCTASGFTFDDSDMGWYRQAPGNERELVSTIRSDGRTLYADSVKGRFTISQDNAKNTIYLQMNSLKPEDTAMYYCASLWLRRLVCWGQGTLVTVS

SEQ ID NO: 3845 - protein, 115 aa, synthetic construct
EVQLVESGGGSVQAGGSLRLSCTASGFTFDDSDMGWYRQAPGNERELVSTISSDGGTYYADSVKGRFTISQDNAKNTVYLQMNSLKPEDTAMYYCASLWLRRLVCWGQGTLVTVS

SEQ ID NO: 3846 - protein, 115 aa, synthetic construct
EVQLVESGGGSVQAGGSLRLSCTASGFTFDDSDMGWYRQAPGNERELVSTISSDGRTLYADSVKGRFTISQDNAKNTIYLQMNSLKPEDTAMYYCASLWLRRLVCWGQGTLVTVS

SEQ ID NO: 3847 - protein, 115 aa, synthetic construct
EVQLVESGGGSVQAGGSLRLSCTASGFTFDDSDMGWYRQAPGNERELVSTISSDGRTLYADSVKGRFTISQDNAKNTVYLQMNSLKPEDTAMYYCASLWLRRLVCWGQGTLVTVS

SEQ ID NO: 3848 - protein, 115 aa, synthetic construct
EVQLVESGGGSVQAGGSLRLSCTASGFTFDDSDMGWYRQAPGNERELVSTISSDGSAYYADSVKGRFTISQDNAKNTIYLQMNSLKPEDTAMYYCASLWLRRLVCWGQGTLVTVS

SEQ ID NO: 3849 - protein, 115 aa, synthetic construct
EVQLVESGGGSVQAGGSLRLSCTASGFTFDDSDMGWYRQAPGNERELVSTISSDGSAYYADSVKGRFTISQDNAKNTVYLQMNSLKPEDTAMYYCASLWLRRLVCWGQGTLVTVS

SEQ ID NO: 3850 - protein, 115 aa, synthetic construct
EVQLVESGGGSVQAGGSLRLSCTASGFTFDDSDMGWYRQAPGNERELVSTISSDGSAYYADSVKGRFTISQDNAKNTVYLQMNSLKPEDTAVYYCASLWLRRLVCWGQGTLVTVS

SEQ ID NO: 3851 - protein, 115 aa, synthetic construct
EVQLVESGGGSVQAGGSLRLSCTASGFTFDDSDMGWYRQAPGNERELVSTISSDGSTYYADSVKGRFTISQDNAKNTIYLQMNSLKPEDTAMYYCASLWLRRLVCWGQGTLVTVS

SEQ ID NO: 3852 - protein, 115 aa, synthetic construct
EVQLVESGGGSVQAGGSLRLSCTASGFTFDDSDMGWYRQAPGNERELVSTVSSDGRTLYADSVKGRFSISQDNAKNTVYLQMNSLKPEDTAVYYCASLWLRRLVCWGQGTLVTVS

SEQ ID NO: 3853 - protein, 115 aa, synthetic construct
EVQLVESGGGSVQAGGSLRLSCTASGFTFDDSDMGWYRQAPGNERELVSTVSSDGRTLYADSVKGRFTISQDNAKNTIYLQMNSLKPEDTAMYYCASLWLRRLVCWGQGTLVTVS

SEQ ID NO: 3854 - protein, 115 aa, synthetic construct
EVQLVESGGGSVQAGGSLRLSCTASGFTFDDSDMGWYRQAPGNERELVSTVSSDGRTLYADSVKGRFTISQDNAKNTVYLQMNSLKPEDTAMYYCASLWLRRLVCWGQGTLVTVS

SEQ ID NO: 3855 - protein, 115 aa, synthetic construct
EVQLVESGGGSVQAGGSLRLSCTASGFTFDDSDMGWYRQARGNECELVSTVSSDGRTLYADSVKGRFTISQDNAKNTIYLQMNSLKPEDTAMYYCASLWLRRLVCWGQGTLVTVS

SEQ ID NO: 3856 - protein, 115 aa, synthetic construct
EVQLVESGGGSVQAGGSLRLSCTASGFTFDDSDMGWYRQARGNERELVSTIFSDGGTYYADSVKGRFTISQDNAKNTVYLQMNSLKPEDTAMYYCASLWLRRLVCWGQGTLVTVS

SEQ ID NO: 3857 - protein, 115 aa, synthetic construct
EVQLVESGGGSVQAGGSLRLSCTASGFTFDDSDMGWYRQARGNERELVSTISSDGGTYYADSVKGRFTISQDNAKNTVYLQMNSLKPEDTAMYYCASLWLRRLVCWGQGTLVTVS

SEQ ID NO: 3858 - protein, 115 aa, synthetic construct
EVQLVESGGGSVQAGGSLRLSCTASGFTFDDSDMGWYRQARGNERELVSTISSDGRTLYADSVKGRFTISQDNAKNTIYLQMNSLKPEDTAMYYCASLWLRRLVCWGQGTLVTVS

SEQ ID NO: 3859 - protein, 115 aa, synthetic construct
EVQLVESGGGSVQAGGSLRLSCTASGFTFDDSDMGWYRQARGNERELVSTISSDGSAYYADSVKGRFTISQDNAKNTIYLQMNSLKPEDTAMYYCASLWLRRLVCWGQGTLVTVS

SEQ ID NO: 3860 - protein, 115 aa, synthetic construct
EVQLVESGGGSVQAGGSLRLSCTASGFTFDDSDMGWYRQARGNERELVSTISSDGSAYYADSVKGRFTISQDNAKNTVYLQMNSLKPEDTAMYYCASLWLRRLVCWGQGTLVTVS

SEQ ID NO: 3861 - protein, 115 aa, synthetic construct
EVQLVESGGGSVQAGGSLRLSCTASGFTFDDSDMGWYRQARGNERELVSTISSDGSAYYADSVKGRFTISQDNAKNTVYLQMNSLKPEDTAVYYCASLWLRRLVCWGQGTLVTVS

SEQ ID NO: 3862 - protein, 115 aa, synthetic construct
EVQLVESGGGSVQAGGSLRLSCTASGFTFDDSDMGWYRQARGNERELVSTISSDGSTYYADSVKGRFSISQDNAKNTVYLQMNSLKPEDTAMYYCASLWLRRLVCWGQGTLVTVS

SEQ ID NO: 3863 - protein, 115 aa, synthetic construct
EVQLVESGGGSVQAGGSLRLSCTASGFTFDDSDMGWYRQARGNERELVSTISSDGSTYYADSVKGRFTISQDNAKNTIYLQMNSLKPEDTAMYYCASLWLRRLVCWGQGTLVTVS

SEQ ID NO: 3864 - protein, 115 aa, synthetic construct
EVQLVESGGGSVQAGGSLRLSCTASGFTFDDSDMGWYRQARGNERELVSTISSDGSTYYADSVKGRFTISQDNAKNTIYLQMNSLKPEDTAVYYCASLWLRRLVCWGQGTLVTVS

SEQ ID NO: 3865 - protein, 115 aa, synthetic construct
EVQLVESGGGSVQAGGSLRLSCTASGFTFDDSDMGWYRQARGNERELVSTISSDGSTYYADSVKGRFTISQDNAKNTVYLQMNSLKPEDTAMYYCASLWLRRLVCWGQGTLVTVS

SEQ ID NO: 3866 - protein, 115 aa, synthetic construct
EVQLVESGGGSVQAGGSLRLSCTASGFTFDDSDMGWYRQARGNERELVSTISSDGSTYYADSVKGRFTISQDNAKNTVYLQMNSLKPEDTAVYYCASLWLRRLVCWGQGTLVTVS

SEQ ID NO: 3867 - protein, 115 aa, synthetic construct
EVQLVESGGGSVQAGGSLRLSCTASGFTFDDSDMGWYRQARGNERELVSTVSSDGRTLYADSVKGRFTISQDNAKNTIYLQMNSLKPEDTAMYYCASLWLRRLVCWGQGTLVTVS

SEQ ID NO: 3868 - protein, 115 aa, synthetic construct
EVQLVESGGGSVQAGGSLRLSCTASGFTFDVSDMGWYRQAPGNECELVSTISSDGSAYYADSVKGRFTISQDNAKNTVYLQMNSLKPEDTAMYYCASLWLRRLVCWGQGTLVTVS

SEQ ID NO: 3869 - protein, 115 aa, synthetic construct
EVQLVESGGGSVQAGGSLRLSCTASGFTFDVSDMGWYRQAPGNECELVSTVSSDGRTLYADSVKGRFTISQDNAKNTIYLQMNSLKPEDTAMYYCASLWLRRLVCWGQGTLVTVS

SEQ ID NO: 3870 - protein, 115 aa, synthetic construct
EVQLVESGGGSVQAGGSLRLSCTASGFTFDVSDMGWYRQAPGNECELVSTVSSDGRTLYADSVKGRFTISQDNAKNTIYLQMNSLKPEDTAVYYCASLWLRRLVCWGQGTLVTVS

SEQ ID NO: 3871 - protein, 115 aa, synthetic construct
EVQLVESGGGSVQAGGSLRLSCTASGFTFDVSDMGWYRQAPGNECELVSTVSSDGRTLYADSVKGRFTISQDNAKNTVYLQMNSLKPEDTAMYYCASLWLRRLVCWGQGTLVTVS

SEQ ID NO: 3872 - protein, 115 aa, synthetic construct
EVQLVESGGGSVQAGGSLRLSCTASGFTFDVSDMGWYRQAPGNECELVSTVSSDGRTLYADSVKGRFTISQDNAKNTVYLQMNSLKPEDTAVYYCASLWLRRLVCWGQGTLVTVS

SEQ ID NO: 3873 - protein, 115 aa, synthetic construct
EVQLVESGGGSVQAGGSLRLSCTASGFTFDVSDMGWYRQAPGNERELVATISSDGSAYYADSVKGRFTISQDNAKNTIYLQMNSLKPEDTAMYYCASLWLRRLVCWGQGTLVTVS

SEQ ID NO: 3874 - protein, 115 aa, synthetic construct
EVQLVESGGGSVQAGGSLRLSCTASGFTFDVSDMGWYRQAPGNERELVSTIFSDGGTYYADSVKGRFTISQDNAKNTIYLQMNSLKPEDTAMYYCASLWLRRLVCWGQGTLVTVS

SEQ ID NO: 3875 - protein, 115 aa, synthetic construct
EVQLVESGGGSVQAGGSLRLSCTASGFTFDVSDMGWYRQAPGNERELVSTIFSDGGTYYADSVKGRFTISQDNAKNTVYLQMNSLKPEDTAMYYCASLWLRRLVCWGQGTLVTVS

SEQ ID NO: 3876 - protein, 115 aa, synthetic construct
EVQLVESGGGSVQAGGSLRLSCTASGFTFDVSDMGWYRQAPGNERELVSTIFSDGGTYYADSVKGRFTISQDNAKNTVYLQMNSLKPEDTAVYYCASLWLRRLVCWGQGTLVTVS

SEQ ID NO: 3877 - protein, 115 aa, synthetic construct
EVQLVESGGGSVQAGGSLRLSCTASGFTFDVSDMGWYRQAPGNERELVSTIFSDGRTLYADSVKGRFTISQDNAKNTIYLQMNSLKPEDTAMYYCASLWLRRLVCWGQGTLVTVS

SEQ ID NO: 3878 - protein, 115 aa, synthetic construct
EVQLVESGGGSVQAGGSLRLSCTASGFTFDVSDMGWYRQAPGNERELVSTISSDGRTLYADSVKGRFTISQDNAKNTIYLQMNSLKPEDTAMYYCASLWLRRLVCWGQGTLVTVS

SEQ ID NO: 3879 - protein, 115 aa, synthetic construct
EVQLVESGGGSVQAGGSLRLSCTASGFTFDVSDMGWYRQAPGNERELVSTISSDGSAYYADSVKGRFSISQDNAKNTVYLQMNSLKPEDTAMYYCASLWLRRLVCWGQGTLVTVS

SEQ ID NO: 3880 - protein, 115 aa, synthetic construct
EVQLVESGGGSVQAGGSLRLSCTASGFTFDVSDMGWYRQAPGNERELVSTISSDGSAYYADSVKGRFTISQDNAKNTIYLQMNSLKPEDTAMYYCASLWLRRLVCWGQGTLVTVS

SEQ ID NO: 3881 - protein, 115 aa, synthetic construct
EVQLVESGGGSVQAGGSLRLSCTASGFTFDVSDMGWYRQAPGNERELVSTISSDGSAYYADSVKGRFTISQDNAKNTIYLQMNSLKPEDTAVYYCASLWLRRLVCWGQGTLVTVS

SEQ ID NO: 3882 - protein, 115 aa, synthetic construct
EVQLVESGGGSVQAGGSLRLSCTASGFTFDVSDMGWYRQAPGNERELVSTISSDGSAYYADSVKGRFTISQDNAKNTVYLQMNSLKPEDTAMYYCASLWLRRLVCWGPGTLVTVS

SEQ ID NO: 3883 - protein, 115 aa, synthetic construct
EVQLVESGGGSVQAGGSLRLSCTASGFTFDVSDMGWYRQAPGNERELVSTISSDGSAYYADSVKGRFTISQDNAKNTVYLQMNSLKPEDTAMYYCASLWLRRLVCWGQGTLVTVS

SEQ ID NO: 3884 - protein, 115 aa, synthetic construct
EVQLVESGGGSVQAGGSLRLSCTASGFTFDVSDMGWYRQAPGNERELVSTISSDGSAYYADSVKGRFTISQDNAKNTVYLQMNSLKPEDTAVYYCASLWLRRLVCWGQGTLVTVS

SEQ ID NO: 3885 - protein, 115 aa, synthetic construct
EVQLVESGGGSVQAGGSLRLSCTASGFTFDVSDMGWYRQAPGNERELVSTISSDGSTLYADSVKGRFTISQDNAKNTIYLQMNSLKPEDTAMYYCASLWLRRLVCWGQGTLVTVS

SEQ ID NO: 3886 - protein, 115 aa, synthetic construct
EVQLVESGGGSVQAGGSLRLSCTASGFTFDVSDMGWYRQAPGNERELVSTISSDGSTYYADSVKGRFTISQDNAKNTIYLQMNSLKPEDTAMYYCASLWLRRLVCWGQGTLVTVS

SEQ ID NO: 3887 - protein, 115 aa, synthetic construct
EVQLVESGGGSVQAGGSLRLSCTASGFTFDVSDMGWYRQAPGNERELVSTVSSDGRTLYADSVKGRFTISQDNAKNTIYLQMNSLKPEDTAMYYCASLWLRRLVCWGQGTLVTVS

SEQ ID NO: 3888 - protein, 115 aa, synthetic construct
EVQLVESGGGSVQAGGSLRLSCTASGFTFDVSDMGWYRQAPGNERELVSTVSSDGRTLYADSVKGRFTISQDNAKNTVYLQMNSLKPEDTAMYYCASLWLRRLVCWGQGTLVTVS

SEQ ID NO: 3889 - protein, 115 aa, synthetic construct
EVQLVESGGGSVQAGGSLRLSCTASGFTFDVSDMGWYRQAPGNERELVSTVSSDGRTLYADSVKGRFTISQDNAKNTVYLQMNSLKPEDTAVYYCASLWLRRLVCWGQGTLVTVS

SEQ ID NO: 3890 - protein, 115 aa, synthetic construct
EVQLVESGGGSVQAGGSLRLSCTASGFTFDVSDMGWYRQARGNERELVSTISSDGSAYYADSVKGRFTISQDNAKNTVYLQMNSLKPEDTAMYYCASLWLRRLVCWGQGTLVTVS

SEQ ID NO: 3891 - protein, 115 aa, synthetic construct
EVQLVESGGGSVQAGGSLRLSCTASGFTFDVSDMGWYRQARGNERELVSTISSDGSAYYADSVKGRFTISQDNAKNTVYLQMNSLKPEDTAVYYCASLWLRRLVCWGQGTLVTVS

SEQ ID NO: 3892 - protein, 115 aa, synthetic construct
EVQLVESGGGSVQAGGSLRLSCTASGFTFDVSDMGWYRQARGNERELVSTISSDGSTYYADSVKGRFTISQDNAKNTIYLQMNSLKPEDTAMYYCASLWLRRLVCWGQGTLVTVS

SEQ ID NO: 3893 - protein, 115 aa, synthetic construct
EVQLVESGGGSVQAGGSLRLSCTASGFTFDVSDMGWYRQARGNERELVSTISSDGSTYYADSVKGRFTISQDNAKNTVYLQMNSLKPEDTAMYYCASLWLRRLVCWGQGTLVTVS

SEQ ID NO: 3894 - protein, 115 aa, synthetic construct
EVQLVESGGGSVQAGGSLRLSCTASGFTFDVSDMGWYRQARGNERELVSTVSSDGRTLYADSVKGRFTISQDNAKNTIYLQMNSLKPEDTAMYYCASLWLRRLVCWGQGTLVTVS

SEQ ID NO: 3895 - protein, 115 aa, synthetic construct
EVQLVESGGGSVQAGGSLRLSRTASGFTFDDSDMGWYRQAPGNECELVSTISSDGSAYYADSVKGRFTISQDNAKNTIYLQMNSLKPEDTAMYYCASLWLRRLVCWGQGTLVTVS

SEQ ID NO: 3896 - protein, 115 aa, synthetic construct
EVQLVESGGGSVQAGGSLRLSRTASGFTFDDSDMGWYRQAPGNECELVSTVSSDGRTLYADSVKGRFSISQDNAKNTIYLQMNSLKPEDTAVYYCASLWLRRLVCWGQGTLVTVS

SEQ ID NO: 3897 - protein, 115 aa, synthetic construct
EVQLVESGGGSVQAGGSLRLSRTASGFTFDDSDMGWYRQAPGNECELVSTVSSDGRTLYADSVKGRFTISQDNAKNTIYLQMNSLKPEDTAMYYCASLWLRRLVCWGQGTLVTVS

SEQ ID NO: 3898 - protein, 115 aa, synthetic construct
EVQLVESGGGSVQAGGSLRLSRTASGFTFDDSDMGWYRQAPGNECELVSTVSSDGRTLYADSVKGRFTISQDNAKNTVYLQMNSLKPEDTAMYYCASLWLRRLVCWGQGTLVTVS

SEQ ID NO: 3899 - protein, 115 aa, synthetic construct
EVQLVESGGGSVQAGGSLRLSRTASGFTFDDSDMGWYRQAPGNECELVSTVSSDGRTLYADSVKGRFTISQDNAKNTVYLQMNSLKPEDTAVYYCASLWLRRLVCWGQGTLVTVS

SEQ ID NO: 3900 - protein, 115 aa, synthetic construct
EVQLVESGGGSVQAGGSLRLSRTASGFTFDDSDMGWYRQAPGNERELVSTIFSDGGTYYADSVKGRFTISQDNAKNTIYLQMNSLKPEDTAMYYCASLWLRRLVCWGQGTLVTVS

SEQ ID NO: 3901 - protein, 115 aa, synthetic construct
EVQLVESGGGSVQAGGSLRLSRTASGFTFDDSDMGWYRQAPGNERELVSTIFSDGGTYYADSVKGRFTISQDNAKNTVYLQMNSLKPEDTAMYYCASLWLRRLVCWGQGTLVTVS

SEQ ID NO: 3902 - protein, 115 aa, synthetic construct
EVQLVESGGGSVQAGGSLRLSRTASGFTFDDSDMGWYRQAPGNERELVSTIFSDGGTYYADSVKGRFTISQDNAKNTVYLQMNSLKPEDTAVYYCASLWLRRLVCWGQGTLVTVS

SEQ ID NO: 3903 - protein, 115 aa, synthetic construct
EVQLVESGGGSVQAGGSLRLSRTASGFTFDDSDMGWYRQAPGNERELVSTISSDGSAYYADSVKGRFSISQDNAKNTVYLQMNSLKPEDTAMYYCASLWLRRLVCWGQGTLVTVS

SEQ ID NO: 3904 - protein, 115 aa, synthetic construct
EVQLVESGGGSVQAGGSLRLSRTASGFTFDDSDMGWYRQAPGNERELVSTISSDGSAYYADSVKGRFTISQDNAKNTIYLQMNSLKPEDTAMYYCASLWLRRLVCWGQGTLVTVS

SEQ ID NO: 3905 - protein, 115 aa, synthetic construct
EVQLVESGGGSVQAGGSLRLSRTASGFTFDDSDMGWYRQAPGNERELVSTISSDGSAYYADSVKGRFTISQDNAKNTVYLQMNSLKPEDTAMYYCASLWLRRLVCWGQGTLVTVS

SEQ ID NO: 3906 - protein, 115 aa, synthetic construct
EVQLVESGGGSVQAGGSLRLSRTASGFTFDDSDMGWYRQAPGNERELVSTISSDGSAYYADSVKGRFTISQDNAKNTVYLQMNSLKPEDTAVYYCASLWLRRLVCWGQGTLVTVS

SEQ ID NO: 3907 - protein, 115 aa, synthetic construct
EVQLVESGGGSVQAGGSLRLSRTASGFTFDDSDMGWYRQAPGNERELVSTISSDGSTYYADSVKGRFTISQDNAKNTIYLQMNSLKPEDTAMYYCASLWLRRLVCWGQGTLVTVS

SEQ ID NO: 3908 - protein, 115 aa, synthetic construct
EVQLVESGGGSVQAGGSLRLSRTASGFTFDDSDMGWYRQAPGNERELVSTISSDGSTYYADSVKGRFTISQDNAKNTVYLQMNSLKPEDTAMYYCASLWLRRLVCWGQGTLVTVS

SEQ ID NO: 3909 - protein, 115 aa, synthetic construct
EVQLVESGGGSVQAGGSLRLSRTASGFTFDDSDMGWYRQAPGNERELVSTVSSDGRTLYADSVKGRFTISQDNAKNTIYLQMNSLKPEDTAMYYCASLWLRRLVCWGQGTLVTVS

SEQ ID NO: 3910 - protein, 115 aa, synthetic construct
EVQLVESGGGSVQAGGSLRLSRTASGFTFDDSDMGWYRQAPGNERELVSTVSSDGRTLYADSVKGRFTISQDNAKNTVYLQMNSLKPEDTAMYYCASLWLRRLVCWGQGTLVTVS

SEQ ID NO: 3911 - protein, 115 aa, synthetic construct
EVQLVESGGGSVQAGGSLRLSRTASGFTFDDSDMGWYRQAPGNERELVSTVSSDGRTLYADSVKGRFTISQDNAKNTVYLQMNSLKPEDTAVYYCASLWLRRLVCWGQGTLVTVS

SEQ ID NO: 3912 - protein, 115 aa, synthetic construct
EVQLVESGGGSVQAGGSLRLSRTASGFTFDDSDMGWYRQARGNERELVSTIFSDGGTYYADSVKGRFTISQDNAKNTVYLQMNSLKPEDTAMYYCASLWLRRLVCWGQGTLVTVS

SEQ ID NO: 3913 - protein, 115 aa, synthetic construct
EVQLVESGGGSVQAGGSLRLSRTASGFTFDDSDMGWYRQARGNERELVSTISSDGSAYYADSVKGRFTISQDNAKNTIYLQMNSLKPEDTAMYYCASLWLRRLVCWGQGTLVTVS

SEQ ID NO: 3914 - protein, 115 aa, synthetic construct
EVQLVESGGGSVQAGGSLRLSRTASGFTFDDSDMGWYRQARGNERELVSTISSDGSAYYADSVKGRFTISQDNAKNTVYLQMNSLKPEDTAMYYCASLWLRRLVCWGQGTLVTVS

SEQ ID NO: 3915 - protein, 115 aa, synthetic construct
EVQLVESGGGSVQAGGSLRLSRTASGFTFDDSDMGWYRQARGNERELVSTISSDGSAYYADSVKGRFTISQDNAKNTVYLQMNSLKPEDTAVYYCASLWLRRLVCWGQGTLVTVS

SEQ ID NO: 3916 - protein, 115 aa, synthetic construct
EVQLVESGGGSVQAGGSLRLSRTASGFTFDDSDMGWYRQARGNERELVSTISSDGSTYYADSVKGRFTISQDNAKNTIYLQMNSLKPEDTAMYYCASLWLRRLVCWGQGTLVTVS

SEQ ID NO: 3917 - protein, 115 aa, synthetic construct
EVQLVESGGGSVQAGGSLRLSRTASGFTFDDSDMGWYRQARGNERELVSTISSDGSTYYADSVKGRFTISQDNAKNTVYLQMNSLKPEDTAMYYCASLWLRRLVCWGQGTLVTVS

SEQ ID NO: 3918 - protein, 115 aa, synthetic construct
EVQLVESGGGSVQAGGSLRLSRTASGFTFDDSDMGWYRQARGNERELVSTISSDGSTYYADSVKGRFTISQDNAKNTVYLQMNSLKPEDTAVYYCASLWLRRLVCWGQGTLVTVS

SEQ ID NO: 3919 - protein, 115 aa, synthetic construct
EVQLVESGGGSVQAGGSLRLSRTASGFTFDVSDMGWYRQAPGNECELVSTVSSDGRTLYADSVKGRFTISQDNAKNTIYLQMNSLKPEDTAMYYCASLWLRRLVCWGQGTLVTVS

SEQ ID NO: 3920 - protein, 115 aa, synthetic construct
EVQLVESGGGSVQAGGSLRLSRTASGFTFDVSDMGWYRQAPGNERELVSTIFSDGGTYYADSVKGRFTISQDNAKNTVYLQMNSLKPEDTAMYYCASLWLRRLVCWGQGTLVTVS

SEQ ID NO: 3921 - protein, 115 aa, synthetic construct
EVQLVESGGGSVQAGGSLRLSRTASGFTFDVSDMGWYRQAPGNERELVSTISSDGSAYYADSVKGRFTISQDNAKNTIYLQMNSLKPEDTAMYYCASLWLRRLVCWGQGTLVTVS

SEQ ID NO: 3922 - protein, 115 aa, synthetic construct
EVQLVESGGGSVQAGGSLRLSRTASGFTFDVSDMGWYRQAPGNERELVSTISSDGSAYYADSVKGRFTISQDNAKNTVYLQMNSLKPEDTAMYYCASLWLRRLVCWGQGTLVTVS

SEQ ID NO: 3923 - protein, 115 aa, synthetic construct
EVQLVESGGGSVQAGGSLRLSRTASGFTFDVSDMGWYRQAPGNERELVSTISSDGSAYYADSVKGRFTISQDNAKNTVYLQMNSLKPEDTAVYYCASLWLRRLVCWGQGTLVTVS

SEQ ID NO: 3924 - protein, 115 aa, synthetic construct
EVQLVESGGGSVQAGGSLRLSRTASGFTFDVSDMGWYRQAPGNERELVSTISSDGSTYYADSVKGRFTISQDNAKNTVYLQMNSLKPEDTAMYYCASLWLRRLVCWGQGTLVTVS

SEQ ID NO: 3925 - protein, 115 aa, synthetic construct
EVQLVESGGGSVQAGGSLRLSRTASGFTFDVSDMGWYRQAPGNERELVSTISSDGSTYYADSVKGRFTISQDNAKNTVYLQMNSLKPEDTAVYYCASLWLRRLVCWGQGTLVTVS

SEQ ID NO: 3926 - protein, 115 aa, synthetic construct
EVQLVESGGGSVQAGGSLRLSRTASGFTFDVSDMGWYRQAPGNERELVSTVSSDGRTLYADSVKGRFTISQDNAKNTIYLQMNSLKPEDTAMYYCASLWLRRLVCWGQGTLVTVS

SEQ ID NO: 3927 - protein, 115 aa, synthetic construct
EVQVVESGGGSVEAGGSLRLSCTASGFTFDDSDMGWYRQAPGNECELVSTVSSDGRTLYADSVKGRFTISQDNAKNTIYLQMNSLKPEDTAMYYCASLWLRRLVCWGQGTLVTVS

SEQ ID NO: 3928 - protein, 115 aa, synthetic construct
EVQVVESGGGSVEAGGSLRLSCTASGFTFDDSDMGWYRQAPGNECELVSTVSSDGRTLYADSVKGRFTISQDNAKNTVYLQMNSLKPEDTAMYYCASLWLRRLVCWGQGTLVTVS

SEQ ID NO: 3929 - protein, 115 aa, synthetic construct
EVQVVESGGGSVEAGGSLRLSCTASGFTFDDSDMGWYRQAPGNERELVATISSDGSAYYADSVKGRFTISQDNAKNTIYLQMNSLKPEDTAMYYCASLWLRRLVCWGQGTLVTVS

SEQ ID NO: 3930 - protein, 115 aa, synthetic construct
EVQVVESGGGSVEAGGSLRLSCTASGFTFDDSDMGWYRQAPGNERELVSTISSDGSAYYADSVKGRFTISQDNAKNTVYLQMNSLKPEDTAMYYCASLWLRRLVCWGQGTLVTVS

SEQ ID NO: 3931 - protein, 115 aa, synthetic construct
EVQVVESGGGSVEAGGSLRLSCTASGFTFDDSDMGWYRQAPGNERELVSTISSDGSAYYADSVKGRFTISQDNAKNTVYLQMNSLKPEDTAVYYCASLWLRRLVCWGQGTLVTVS

SEQ ID NO: 3932 - protein, 115 aa, synthetic construct
EVQVVESGGGSVEAGGSLRLSCTASGFTFDDSDMGWYRQARGNERELVSTISSDGSTYYADSVKGRFTISQDNAKNTIYLQMNSLKPEDTAMYYCASLWLRRLVCWGQGTLVTVS

SEQ ID NO: 3933 - protein, 115 aa, synthetic construct
EVQVVESGGGSVEAGGSLRLSCTASGFTFDDSDMGWYRQARGNERELVSTISSDGSTYYADSVKGRFTISQDNAKNTVYLQMNSLKPEDTAMYYCASLWLRRLVCWGQGTLVTVS

SEQ ID NO: 3934 - protein, 115 aa, synthetic construct
EVQVVESGGGSVEAGGSLRLSCTASGFTFDVSDMGWYRQAPGNERELVSTISSDGSAYYADSVKGRFTISQDNAKNTIYLQMNSLKPEDTAMYYCASLWLRRLVCWGQGTLVTVS

SEQ ID NO: 3935 - protein, 115 aa, synthetic construct
EVQVVESGGGSVEAGGSLRLSCTASGFTFDVSDMGWYRQAPGNERELVSTISSDGSAYYADSVKGRFTISQDNAKNTVYLQMNSLKPEDTAMYYCASLWLRRLVCWGQGTLVTVS

SEQ ID NO: 3936 - protein, 115 aa, synthetic construct
EVQVVESGGGSVEAGGSLRLSCTASGFTFDVSDMGWYRQAPGNERELVSTISSDGSAYYADSVKGRFTISQDNAKNTVYLQMNSLKPEDTAVYYCASLWLRRLVCWGQGTLVTVS

SEQ ID NO: 3937 - protein, 115 aa, synthetic construct
EVQVVESGGGSVQAGGSLRLSCTASGFTFDDSDMGWYRQAPGNECELVSTVSSDGRTLYADSVKGRFSISQDNAKNTVYLQMNSLKPEDTAMYYCASLWLRRLVCWGQGTLVTVS

SEQ ID NO: 3938 - protein, 115 aa, synthetic construct
EVQVVESGGGSVQAGGSLRLSCTASGFTFDDSDMGWYRQAPGNECELVSTVSSDGRTLYADSVKGRFTISQDNAKNTIYLQMNSLKPEDTAMYYCASLWLRRLVCWGQGTLVTVS

SEQ ID NO: 3939 - protein, 115 aa, synthetic construct
EVQVVESGGGSVQAGGSLRLSCTASGFTFDDSDMGWYRQAPGNECELVSTVSSDGRTLYADSVKGRFTISQDNAKNTVYLQMNSLKPEDTAMYYCASLWLRRLVCWGQGTLVTVS

SEQ ID NO: 3940 - protein, 115 aa, synthetic construct
EVQVVESGGGSVQAGGSLRLSCTASGFTFDDSDMGWYRQAPGNERELVSTIFSDGGTYYADSVKGRFTISQDNAKNTIYLQMNSLKPEDTAMYYCASLWLRRLVCWGQGTLVTVS

SEQ ID NO: 3941 - protein, 115 aa, synthetic construct
EVQVVESGGGSVQAGGSLRLSCTASGFTFDDSDMGWYRQAPGNERELVSTIFSDGGTYYADSVKGRFTISQDNAKNTVYLQMNSLKPEDTAMYYCASLWLRRLVCWGQGTLVTVS

SEQ ID NO: 3942 - protein, 115 aa, synthetic construct
EVQVVESGGGSVQAGGSLRLSCTASGFTFDDSDMGWYRQAPGNERELVSTIFSDGGTYYADSVKGRFTISQDNAKNTVYLQMNSLKPEDTAVYYCASLWLRRLVCWGQGTLVTVS

SEQ ID NO: 3943 - protein, 115 aa, synthetic construct
EVQVVESGGGSVQAGGSLRLSCTASGFTFDDSDMGWYRQAPGNERELVSTISSDGSAYYADSVKGRFTISQDNAKNTIYLQMNSLKPEDTAMYYCASLWLRRLVCWGQGTLVTVS

SEQ ID NO: 3944 - protein, 115 aa, synthetic construct
EVQVVESGGGSVQAGGSLRLSCTASGFTFDDSDMGWYRQAPGNERELVSTISSDGSAYYADSVKGRFTISQDNAKNTVYLQMNSLKPEDTAMYYCASLWLRRLVCWGQGTLVTVS

SEQ ID NO: 3945 - protein, 115 aa, synthetic construct
EVQVVESGGGSVQAGGSLRLSCTASGFTFDDSDMGWYRQAPGNERELVSTISSDGSAYYADSVKGRFTISQDNAKNTVYLQMNSLKPEDTAVYYCASLWLRRLVCWGQGTLVTVS

SEQ ID NO: 3946 - protein, 115 aa, synthetic construct
EVQVVESGGGSVQAGGSLRLSCTASGFTFDDSDMGWYRQAPGNERELVSTISSDGSTYYADSVKGRFTISQDNAKNTIYLQMNSLKPEDTAMYYCASLWLRRLVCWGQGTLVTVS

SEQ ID NO: 3947 - protein, 115 aa, synthetic construct
EVQVVESGGGSVQAGGSLRLSCTASGFTFDDSDMGWYRQAPGNERELVSTVSSDGRTLYADSVKGRFTISQDNAKNTIYLQMNSLKPEDTAMYYCASLWLRRLVCWGQGTLVTVS

SEQ ID NO: 3948 - protein, 115 aa, synthetic construct
EVQVVESGGGSVQAGGSLRLSCTASGFTFDDSDMGWYRQARGNERELVSTISSDGSAYYADSVKGRFTISQDNAKNTIYLQMNSLKPEDTAMYYCASLWLRRLVCWGQGTLVTVS

SEQ ID NO: 3949 - protein, 115 aa, synthetic construct
EVQVVESGGGSVQAGGSLRLSCTASGFTFDDSDMGWYRQARGNERELVSTISSDGSAYYADSVKGRFTISQDNAKNTVYLQMNSLKPEDTAMYYCASLWLRRLVCWGQGTLVTVS

SEQ ID NO: 3950 - protein, 115 aa, synthetic construct
EVQVVESGGGSVQAGGSLRLSCTASGFTFDDSDMGWYRQARGNERELVSTISSDGSTYYADSVKGRFTISQDNAKNTIYLQMNSLKPEDTAMYYCASLWLRRLVCWGQGTLVTVS

SEQ ID NO: 3951 - protein, 115 aa, synthetic construct
EVQVVESGGGSVQAGGSLRLSCTASGFTFDDSDMGWYRQARGNERELVSTISSDGSTYYADSVKGRFTISQDNAKNTVYLQMNSLKPEDTAMYYCASLWLRRLVCWGQGTLVTVS

SEQ ID NO: 3952 - protein, 115 aa, synthetic construct
EVQVVESGGGSVQAGGSLRLSCTASGFTFDDSDMGWYRQARGNERELVSTISSDGSTYYADSVKGRFTISQDNAKNTVYLQMNSLKPEDTAVYYCASLWLRRLVCWGQGTLVTVS

SEQ ID NO: 3953 - protein, 115 aa, synthetic construct
EVQVVESGGGSVQAGGSLRLSCTASGFTFDDSDMGWYRQARGNERELVSTVSSDGRTLYADSVKGRFTISQDNAKNTIYLQMNSLKPEDTAMYYCASLWLRRLVCWGQGTLVTVS

SEQ ID NO: 3954 - protein, 115 aa, synthetic construct
EVQVVESGGGSVQAGGSLRLSCTASGFTFDVSDMGWYRQAPGNECELVSTVSSDGRTLYADSVKGRFTISQDNAKNTIYLQMNSLKPEDTAMYYCASLWLRRLVCWGQGTLVTVS

SEQ ID NO: 3955 - protein, 115 aa, synthetic construct
EVQVVESGGGSVQAGGSLRLSCTASGFTFDVSDMGWYRQAPGNECELVSTVSSDGRTLYADSVKGRFTISQDNAKNTVYLQMNSLKPEDTAMYYCASLWLRRLVCWGQGTLVTVS

SEQ ID NO: 3956 - protein, 115 aa, synthetic construct
EVQVVESGGGSVQAGGSLRLSCTASGFTFDVSDMGWYRQAPGNERELVSTIFSDGGTYYADSVKGRFTISQDNAKNTIYLQMNSLKPEDTAMYYCASLWLRRLVCWGQGTLVTVS

SEQ ID NO: 3957 - protein, 115 aa, synthetic construct
EVQVVESGGGSVQAGGSLRLSCTASGFTFDVSDMGWYRQAPGNERELVSTIFSDGGTYYADSVKGRFTISQDNAKNTVYLQMNSLKPEDTAMYYCASLWLRRLVCWGQGTLVTVS

SEQ ID NO: 3958 - protein, 115 aa, synthetic construct
EVQVVESGGGSVQAGGSLRLSCTASGFTFDVSDMGWYRQAPGNERELVSTIFSDGGTYYADSVKGRFTISQDNAKNTVYLQMNSLKPEDTAVYYCASLWLRRLVCWGQGTLVTVS

SEQ ID NO: 3959 - protein, 115 aa, synthetic construct
EVQVVESGGGSVQAGGSLRLSCTASGFTFDVSDMGWYRQAPGNERELVSTISSDGGTYYADSVKGRFTISQDNAKNTVYLQMNSLKPEDTAMYYCASLWLRRLVCWGQGTLVTVS

SEQ ID NO: 3960 - protein, 115 aa, synthetic construct
EVQVVESGGGSVQAGGSLRLSCTASGFTFDVSDMGWYRQAPGNERELVSTISSDGRTLYADSVKGRFTISQDNAKNTIYLQMNSLKPEDTAMYYCASLWLRRLVCWGQGTLVTVS

SEQ ID NO: 3961 - protein, 115 aa, synthetic construct
EVQVVESGGGSVQAGGSLRLSCTASGFTFDVSDMGWYRQAPGNERELVSTISSDGSAYYADSVKGRFSISQDNAKNTIYLQMNSLKPEDTAMYYCASLWLRRLVCWGQGTLVTVS

SEQ ID NO: 3962 - protein, 115 aa, synthetic construct
EVQVVESGGGSVQAGGSLRLSCTASGFTFDVSDMGWYRQAPGNERELVSTISSDGSAYYADSVKGRFSISQDNAKNTVYLQMNSLKPEDTAMYYCASLWLRRLVCWGQGTLVTVS

SEQ ID NO: 3963 - protein, 115 aa, synthetic construct
EVQVVESGGGSVQAGGSLRLSCTASGFTFDVSDMGWYRQAPGNERELVSTISSDGSAYYADSVKGRFTISQDNAKNTIYLQMNSLKPEDTAMYYCASLWLRRLVCWGQGTLVTVS

SEQ ID NO: 3964 - protein, 115 aa, synthetic construct
EVQVVESGGGSVQAGGSLRLSCTASGFTFDVSDMGWYRQAPGNERELVSTISSDGSAYYADSVKGRFTISQDNAKNTVYLQMNSLKPEDTAMYYCASLWLRRLVCWGQGTLVTVS

SEQ ID NO: 3965 - protein, 115 aa, synthetic construct
EVQVVESGGGSVQAGGSLRLSCTASGFTFDVSDMGWYRQAPGNERELVSTISSDGSAYYADSVKGRFTISQDNAKNTVYLQMNSLKPEDTAVYYCASLWLRRLVCWGQGTLVTVS

SEQ ID NO: 3966 - protein, 115 aa, synthetic construct
EVQVVESGGGSVQAGGSLRLSCTASGFTFDVSDMGWYRQAPGNERELVSTISSDGSTYYADSVKGRFTISQDNAKNTIYLQMNSLKPEDTAMYYCASLWLRRLVCWGQGTLVTVS

SEQ ID NO: 3967 - protein, 115 aa, synthetic construct
EVQVVESGGGSVQAGGSLRLSCTASGFTFDVSDMGWYRQAPGNERELVSTVSSDGRTLYADSVKGRFTISQDNAKNTIYLQMNSLKPEDTAMYYCASLWLRRLVCWGQGTLVTVS

SEQ ID NO: 3968 - protein, 115 aa, synthetic construct
EVQVVESGGGSVQAGGSLRLSCTASGFTFDVSDMGWYRQARGNERELVSTISSDGSTYYADSVKGRFTISQDNAKNTIYLQMNSLKPEDTAMYYCASLWLRRLVCWGQGTLVTVS

SEQ ID NO: 3969 - protein, 115 aa, synthetic construct
EVQVVESGGGSVQAGGSLRLSRTASGFTFDDSDMGWYRQAPGNECELVSTVSSDGRTLYADSVKGRFTISQDNAKNTIYLQMNSLKPEDTAMYYCASLWLRRLVCWGQGTLVTVS

SEQ ID NO: 3970 - protein, 115 aa, synthetic construct
EVQVVESGGGSVQAGGSLRLSRTASGFTFDDSDMGWYRQAPGNECELVSTVSSDGRTLYADSVKGRFTISQDNAKNTVYLQMNSLKPEDTAMYYCASLWLRRLVCWGQGTLVTVS

SEQ ID NO: 3971 - protein, 115 aa, synthetic construct
EVQVVESGGGSVQAGGSLRLSRTASGFTFDDSDMGWYRQAPGNERELVSTIFSDGGTYYADSVKGRFTISQDNAKNTIYLQMNSLKPEDTAMYYCASLWLRRLVCWGQGTLVTVS

SEQ ID NO: 3972 - protein, 115 aa, synthetic construct
EVQVVESGGGSVQAGGSLRLSRTASGFTFDDSDMGWYRQAPGNERELVSTIFSDGGTYYADSVKGRFTISQDNAKNTVYLQMNSLKPEDTAMYYCASLWLRRLVCWGQGTLVTVS

SEQ ID NO: 3973 - protein, 115 aa, synthetic construct
EVQVVESGGGSVQAGGSLRLSRTASGFTFDDSDMGWYRQAPGNERELVSTIFSDGGTYYADSVKGRFTISQDNAKNTVYLQMNSLKPEDTAVYYCASLWLRRLVCWGQGTLVTVS

SEQ ID NO: 3974 - protein, 115 aa, synthetic construct
EVQVVESGGGSVQAGGSLRLSRTASGFTFDDSDMGWYRQAPGNERELVSTISSDGSAYYADSVKGRFTISQDNAKNTIYLQMNSLKPEDTAMYYCASLWLRRLVCWGQGTLVTVS

SEQ ID NO: 3975 - protein, 115 aa, synthetic construct
EVQVVESGGGSVQAGGSLRLSRTASGFTFDDSDMGWYRQAPGNERELVSTISSDGSAYYADSVKGRFTISQDNAKNTVYLQMNSLKPEDTAMYYCASLWLRRLVCWGQGTLVTVS

SEQ ID NO: 3976 - protein, 115 aa, synthetic construct
EVQVVESGGGSVQAGGSLRLSRTASGFTFDDSDMGWYRQAPGNERELVSTISSDGSTYYADSVKGRFTISQDNAKNTVYLQMNSLKPEDTAVYYCASLWLRRLVCWGQGTLVTVS

SEQ ID NO: 3977 - protein, 115 aa, synthetic construct
EVQVVESGGGSVQAGGSLRLSRTASGFTFDDSDMGWYRQAPGNERELVSTVSSDGRTLYADSVKGRFTISQDNAKNTIYLQMNSLKPEDTAMYYCASLWLRRLVCWGQGTLVTVS

SEQ ID NO: 3978 - protein, 115 aa, synthetic construct
EVQVVESGGGSVQAGGSLRLSRTASGFTFDDSDMGWYRQARGNERELVSTISSDGSTYYADSVKGRFTISQDNAKNTIYLQMNSLKPEDTAMYYCASLWLRRLVCWGQGTLVTVS

SEQ ID NO: 3979 - protein, 115 aa, synthetic construct
EVQVVESGGGSVQAGGSLRLSRTASGFTFDDSDMGWYRQARGNERELVSTISSDGSTYYADSVKGRFTISQDNAKNTVYLQMNSLKPEDTAMYYCASLWLRRLVCWGQGTLVTVS

SEQ ID NO: 3980 - protein, 115 aa, synthetic construct
EVQVVESGGGSVQAGGSLRLSRTASGFTFDVSDMGWYRQAPGNERELVSTISSDGSAYYADSVKGRFTISQDNAKNTIYLQMNSLKPEDTAMYYCASLWLRRLVCWGQGTLVTVS

SEQ ID NO: 3981 - protein, 115 aa, synthetic construct
EVQVVESGGGSVQAGGSLRLSRTASGFTFDVSDMGWYRQAPGNERELVSTISSDGSAYYADSVKGRFTISQDNAKNTVYLQMNSLKPEDTAMYYCASLWLRRLVCWGQGTLVTVS

SEQ ID NO: 3982 - protein, 115 aa, synthetic construct
EVQVVESGGGSVQAGGSLRLSRTASGFTFDVSDMGWYRQAPGNERELVSTISSDGSAYYADSVKGRFTISQDNAKNTVYLQMNSLKPEDTAVYYCASLWLRRLVCWGQGTLVTVS

SEQ ID NO: 3983 - protein, 114 aa, synthetic construct
VQLVESGGGSVQAGGSLRLSCTASGFTFDDSDMGWYRQAPGNERELVSTISSDGSAYYADSVKGRFTISQDNAKNTVYLQMNSLKPEDTAMYYCASLWLRRLVCWGQGTLVTVS

SEQ ID NO: 3984 - protein, 113 aa, synthetic construct
LQLVESGGGLVQPGGSLRLSCAASGFTLDNYAIGWFRQAPGKEREGVSSISSSGGSTNYADSVKGRFTVSRDNAKNTVYLQMNSLKPEDTAVYSCAAAGGFRYWGQGTLVTVS

SEQ ID NO: 3985 - protein, 113 aa, synthetic construct
LQLVESGGGLVQPGGSLRLSCAASGFTLDNYAIGWFRQAPGKEREGVSSISSSGGSTNYADSVKGRFTVSRDNAKQTVYLQMNSLKPEDTAVYSCAAAGGFRYWGQGTLVTVS

SEQ ID NO: 3986 - protein, 117 aa, synthetic construct
LQLVESGGGLVQPGGSLRLSCAASGFTLDSYAIGWFRQAPGKEREGVSYISSSGGSTNYADSVKGRFTISRDNAKNTVYLQMNSLKPEDSAVYSCAAAGGYGNSSRYWGQGTSVTVS

SEQ ID NO: 3987 - protein, 117 aa, synthetic construct
LQLVESGGGLVQPGGSLRLSCAASGFTLDSYAIGWFRQAPGKEREGVSYISSSGGSTNYADSVKGRFTISRDNAKNTVYLQMNSLKPEDSAVYSCAAAGGYRNSSRCWGQGTSVTVS

SEQ ID NO: 3988 - protein, 117 aa, synthetic construct
LQLVESGGGLVQPGGSLRLSCAASGFTLDSYAIGWFRQAPGKEREGVSYISSSGGSTNYADSVKGRFTISRDNAKNTVYLQMNSLKPEDSAVYSCAAAGGYRNSSRFWGQGTSVTVS

SEQ ID NO: 3989 - protein, 117 aa, synthetic construct
LQLVESGGGLVQPGGSLRLSCAASGFTLDSYAIGWFRQAPGKEREGVSYISSSGGSTNYADSVKGRFTISRDNAKNTVYLQMNSLKPEDSAVYSCAAAGGYRNSSRYWGQGTSVTVS

SEQ ID NO: 3990 - protein, 117 aa, synthetic construct
LQLVESGGGLVQPGGSLRLSCAASGFTLDSYAIGWFRQAPGKEREGVSYISSSGGSTNYADSVKGRFTISRDNAKNTVYLQMNSLKPEDSAVYYCAAAGGYRNSSRCWGQGTSVTVS

SEQ ID NO: 3991 - protein, 117 aa, synthetic construct
LQLVESGGGLVQPGGSLRLSCAASGFTLDSYAIGWFRQAPGKEREGVSYISSSGGSTNYADSVKGRFTVSRDNAKNTVYLQMNSLKPEDSAVYSCAAAGGYGNSSRYWGQGTSVTVS

SEQ ID NO: 3992 - protein, 117 aa, synthetic construct
LQLVESGGGLVQPGGSLRLSCAASGFTLDSYAIGWFRQAPGKEREGVSYISSSGGSTNYADSVKGRFTVSRDNAKNTVYLQMNSLKPEDSAVYSCAAAGGYRNSSRYWGQGTSVTVS

SEQ ID NO: 3993 - protein, 117 aa, synthetic construct
LQLVESGGGLVQPGGSLRLSCAASGFTLDYFAIGWFRQAPGKEREGVSYISSSGDSTNYADTVKGRFTISRDNAKNTVFLQMNSLKPEDTGVYSCAAAGGYGNSSRYWGQGTSVTVS

SEQ ID NO: 3994 - protein, 117 aa, synthetic construct
LQLVESGGGLVQPGGSLRLSCAASGFTLDYFAIGWFRQAPGKEREGVSYISSSGGSTNYADSVKGRFTISRDNAKNTVYLQMNSLKPEDSAVYSCAAAGGYGNSSRYWGQGTSVTVS

SEQ ID NO: 3995 - protein, 117 aa, synthetic construct
LQLVESGGGLVQPGGSLRLSCAASGFTLDYFAIGWFRQAPGKEREGVSYISSSGGSTNYADSVKGRFTISRDNAKNTVYLQMNSLKPEDSAVYSCAAAGGYRNSSRFWGQGTSVTVS

SEQ ID NO: 3996 - protein, 117 aa, synthetic construct
LQLVESGGGLVQPGGSLRLSCAASGFTLDYFAIGWFRQAPGKEREGVSYISSSGGSTNYADSVKGRFTISRDNAKNTVYLQMNSLKPEDSAVYSCAAAGGYRNSSRYWGQGTSVTVS

SEQ ID NO: 3997 - protein, 117 aa, synthetic construct
LQLVESGGGLVQPGGSLRLSCAASGFTLDYFAIGWFRQAPGKEREGVSYISSSGGSTNYADSVKGRFTVSRDNAKNTVYLQMNSLKPEDSAVYSCAAAGGYGNSSRYWGQGTSVTVS

SEQ ID NO: 3998 - protein, 117 aa, synthetic construct
LQLVESGGGLVQPGGSLRLSCAASGFTLDYFAIGWFRQAPGKEREGVSYISSSGGSTNYADSVKGRFTVSRDNAKNTVYLQMNSLKPEDSAVYSCAAAGGYRNSSRYWGQGTSVTVS

SEQ ID NO: 3999 - protein, 117 aa, synthetic construct
LQLVESGGGLVQPGGSLRLSCAASGFTLDYYAIGWFRQAPGKEREGVSCISSSGGSTNYADSVKGRFTVSRDNAKNTVYLQMNSLKPEDSAVYSCAAAGGYGNSSRYWGQGTSVTVS

SEQ ID NO: 4000 - protein, 117 aa, synthetic construct
LQLVESGGGLVQPGGSLRLSCAASGFTLDYYAIGWFRQAPGKEREGVSYISSSGDSTNYADSVKGRFTISRDNAKNTVFLQMNSLKPEDTGVYSCAAAGGYGNSSRYWGQGTSVTVS

SEQ ID NO: 4001 - protein, 117 aa, synthetic construct
LQLVESGGGLVQPGGSLRLSCAASGFTLDYYAIGWFRQAPGKEREGVSYISSSGDSTNYADTVKGRFTISRDNAKNTVFLQMNSLKPEDTGVYSCAAAGGYGNSSRYWGQGTSVTVS

SEQ ID NO: 4002 - protein, 117 aa, synthetic construct
LQLVESGGGLVQPGGSLRLSCAASGFTLDYYAIGWFRQAPGKEREGVSYISSSGGSTNYADGVKGRFTISRDNAKNTVYLQMNSLKPEDSAVYSCAAAGGYRNSSRFWGQGTSVTVS

SEQ ID NO: 4003 - protein, 117 aa, synthetic construct
LQLVESGGGLVQPGGSLRLSCAASGFTLDYYAIGWFRQAPGKEREGVSYISSSGGSTNYADGVKGRFTISRDNAKNTVYLQMNSLKPEDSAVYSCAAAGGYRNSSRYWGQGTSVTVS

SEQ ID NO: 4004 - protein, 117 aa, synthetic construct
LQLVESGGGLVQPGGSLRLSCAASGFTLDYYAIGWFRQAPGKEREGVSYISSSGGSTNYADSVKGRFTISRDNAKNTVFLQMNSLKPEDSAVYSCAAAGGYGNSSRYWGQGTSVTVS

SEQ ID NO: 4005 - protein, 117 aa, synthetic construct
LQLVESGGGLVQPGGSLRLSCAASGFTLDYYAIGWFRQAPGKEREGVSYISSSGGSTNYADSVKGRFTISRDNAKNTVFLQMNSLKPEDSAVYSCAAAGGYRNSSRFWGQGTSVTVS

SEQ ID NO: 4006 - protein, 117 aa, synthetic construct
LQLVESGGGLVQPGGSLRLSCAASGFTLDYYAIGWFRQAPGKEREGVSYISSSGGSTNYADSVKGRFTISRDNAKNTVFLQMNSLKPEDSAVYSCAAAGGYRNSSRYWGQGTSVTVS

SEQ ID NO: 4007 - protein, 117 aa, synthetic construct
LQLVESGGGLVQPGGSLRLSCAASGFTLDYYAIGWFRQAPGKEREGVSYISSSGGSTNYADSVKGRFTISRDNAKNTVSLQMNSLKPEDSAVYSCAAAGGYRNSSRYWGQGTSVTVS

SEQ ID NO: 4008 - protein, 117 aa, synthetic construct
LQLVESGGGLVQPGGSLRLSCAASGFTLDYYAIGWFRQAPGKEREGVSYISSSGGSTNYADSVKGRFTISRDNAKNTVYLQMNSLKPEDSAVYSCAAAGGYGNFSRYWGQGTSVTVS

SEQ ID NO: 4009 - protein, 117 aa, synthetic construct
LQLVESGGGLVQPGGSLRLSCAASGFTLDYYAIGWFRQAPGKEREGVSYISSSGGSTNYADSVKGRFTISRDNAKNTVYLQMNSLKPEDSAVYSCAAAGGYGNSSRHWGQGTSVTVS

SEQ ID NO: 4010 - protein, 117 aa, synthetic construct
LQLVESGGGLVQPGGSLRLSCAASGFTLDYYAIGWFRQAPGKEREGVSYISSSGGSTNYADSVKGRFTISRDNAKNTVYLQMNSLKPEDSAVYSCAAAGGYGNSSRYWGQGTSVAVS

SEQ ID NO: 4011 - protein, 117 aa, synthetic construct
LQLVESGGGLVQPGGSLRLSCAASGFTLDYYAIGWFRQAPGKEREGVSYISSSGGSTNYADSVKGRFTISRDNAKNTVYLQMNSLKPEDSAVYSCAAAGGYGNSSRYWGQGTSVTVS

SEQ ID NO: 4012 - protein, 117 aa, synthetic construct
LQLVESGGGLVQPGGSLRLSCAASGFTLDYYAIGWFRQAPGKEREGVSYISSSGGSTNYADSVKGRFTISRDNAKNTVYLQMNSLKPEDSAVYSCAAAGGYRNSSRCWGQGTSVTVS

SEQ ID NO: 4013 - protein, 117 aa, synthetic construct
LQLVESGGGLVQPGGSLRLSCAASGFTLDYYAIGWFRQAPGKEREGVSYISSSGGSTNYADSVKGRFTISRDNAKNTVYLQMNSLKPEDSAVYSCAAAGGYRNSSRFWGQGTSVTVS

SEQ ID NO: 4014 - protein, 117 aa, synthetic construct
LQLVESGGGLVQPGGSLRLSCAASGFTLDYYAIGWFRQAPGKEREGVSYISSSGGSTNYADSVKGRFTISRDNAKNTVYLQMNSLKPEDSAVYSCAAAGGYRNSSRHWGQGTSVTVS

SEQ ID NO: 4015 - protein, 117 aa, synthetic construct
LQLVESGGGLVQPGGSLRLSCAASGFTLDYYAIGWFRQAPGKEREGVSYISSSGGSTNYADSVKGRFTISRDNAKNTVYLQMNSLKPEDSAVYSCAAAGGYRNSSRYWGQGTSVTVS

SEQ ID NO: 4016 - protein, 117 aa, synthetic construct
LQLVESGGGLVQPGGSLRLSCAASGFTLDYYAIGWFRQAPGKEREGVSYISSSGGSTNYADSVKGRFTISRDNAKNTVYLQMNSLKPEDSAVYSCAAAGGYRNSSRYWGQGTTVTVS

SEQ ID NO: 4017 - protein, 117 aa, synthetic construct
LQLVESGGGLVQPGGSLRLSCAASGFTLDYYAIGWFRQAPGKEREGVSYISSSGGSTNYADSVKGRFTVSRDNAKNTVYLQMNSLKPEDSAVYSCAAAGGYGNFSRYWGQGTSVTVS

SEQ ID NO: 4018 - protein, 117 aa, synthetic construct
LQLVESGGGLVQPGGSLRLSCAASGFTLDYYAIGWFRQAPGKEREGVSYISSSGGSTNYADSVKGRFTVSRDNAKNTVYLQMNSLKPEDSAVYSCAAAGGYGNSPRYWGQGTSVTVS

SEQ ID NO: 4019 - protein, 117 aa, synthetic construct
LQLVESGGGLVQPGGSLRLSCAASGFTLDYYAIGWFRQAPGKEREGVSYISSSGGSTNYADSVKGRFTVSRDNAKNTVYLQMNSLKPEDSAVYSCAAAGGYGNSSRYWGQGTSVTVS

SEQ ID NO: 4020 - protein, 117 aa, synthetic construct
LQLVESGGGLVQPGGSLRLSCAASGFTLDYYAIGWFRQAPGKEREGVSYISSSGGSTNYADSVKGRFTVSRDNAKNTVYLQMNSLKPEDSAVYSCAAAGGYRNSSRCWGQGTSVTVS

SEQ ID NO: 4021 - protein, 117 aa, synthetic construct
LQLVESGGGLVQPGGSLRLSCAASGFTLDYYAIGWFRQAPGKEREGVSYISSSGGSTNYADSVKGRFTVSRDNAKNTVYLQMNSLKPEDSAVYSCAAAGGYRNSSRFWGQGTSVTVS

SEQ ID NO: 4022 - protein, 117 aa, synthetic construct
LQLVESGGGLVQPGGSLRLSCAASGFTLDYYAIGWFRQAPGKEREGVSYISSSGGSTNYADSVKGRFTVSRDNAKNTVYLQMNSLKPEDSAVYSCAAAGGYRNSSRYWGQGTSVTVS

SEQ ID NO: 4023 - protein, 117 aa, synthetic construct
LQLVESGGGLVQPGGSLRLSCAASGFTLDYYAIGWFRQAPGKEREGVSYISSSGGSTNYADTVKGRFTISRDNAKNTVYLQMNSLKPEDSAVYSCAAAGGYRNSSRYWGQGTSVTVS

SEQ ID NO: 4024 - protein, 117 aa, synthetic construct
LQLVESGGGLVQPGGSLRLSCAASGFTLDYYAIGWFRQAPGKEREGVSYISSSGGSTNYAESVKGRFTISRDNAKNTVYLQMNSLKPEDSAVYSCAAAGGYGNSSRYWGQGTSVTVS

SEQ ID NO: 4025 - protein, 117 aa, synthetic construct
LQLVESGGGLVQPGGSLRLSCAASGFTLDYYAIGWFRQAPGKEREGVSYISSSGGSTNYAESVKGRFTISRDNAKNTVYLQMNSLKPEDSAVYSCAAAGGYRNSSRFWGQGTSVTVS

SEQ ID NO: 4026 - protein, 117 aa, synthetic construct
LQLVESGGGLVQPGGSLRLSCAASGFTLDYYAIGWFRQAPGKEREGVSYISSSGGSTNYAESVKGRFTISRDNAKNTVYLQMNSLKPEDSAVYSCAAAGGYRNSSRYWGQGTSVTVS

SEQ ID NO: 4027 - protein, 117 aa, synthetic construct
LQLVESGGGLVQPGGSLRLSCAASGFTLDYYAIGWFRQAPGKEREGVSYISSSGGSTNYAESVKGRFTVSRDNAKNTVYLQMNSLKPEDSAVYSCAAAGGYRNSSRYWGQGTSVTVS

SEQ ID NO: 4028 - protein, 117 aa, synthetic construct
LQLVESGGGLVQPGGSLRLSCAASGFTLDYYAIGWSRQAPGKEREGVSYISSSGGSTNYADSVKGRFTVSRDNAKNTVYLQMNSLKPEDSAVYSCAAAGGYGNSSRYWGQGTSVTVS

SEQ ID NO: 4029 - protein, 117 aa, synthetic construct
LQLVESGGGLVQPGGSLRLSCAASGVTLDYYAIGWFRQAPGKEREGVSYISSSGGSTNYADSVKGRFTISRDNAKNTVYLQMNSLKPEDSAVYSCAAAGGYRNSSRFWGQGTSVTVS

SEQ ID NO: 4030 - protein, 117 aa, synthetic construct
LQLVESGGGLVQPGGSLRLSCAASGVTLDYYAIGWFRQAPGKEREGVSYISSSGGSTNYADSVKGRFTISRDNAKNTVYLQMNSLKPEDSAVYSCAAAGGYRNSSRYWGQGTSVTVS

SEQ ID NO: 4031 - protein, 115 aa, synthetic construct
LVESGGGLVQPGGSLRLSCAASGFSLDYYAIGWFRQAPGKEREGVSYISSSGDSTNYADSVKGRFTISRDNAKNTVYLQMNSLKPEDTAVYSCAAAGGYGNSSRYWGQGTSVTVS

SEQ ID NO: 4032 - protein, 115 aa, synthetic construct
LVESGGGLVQPGGSLRLSCAASGFSLDYYAIGWFRQAPGKEREGVSYISSSGDSTNYADSVKGRFTISRDNAKNTVYLQMNSLKPEDTGVYSCAAAGGYGNSSRYWGQGTSVTVS

SEQ ID NO: 4033 - protein, 115 aa, synthetic construct
LVESGGGLVQPGGSLRLSCAASGFSLDYYAIGWFRQAPGKEREGVSYISSSGDSTNYADTVKGRFTISRDNAKNTVYLQMNSLKPEDSAVYYCAAAGGYGNSSRYWGQGTSVTVS

SEQ ID NO: 4034 - protein, 115 aa, synthetic construct
LVESGGGLVQPGGSLRLSCAASGFSLDYYAIGWFRQAPGKEREGVSYISSSGDSTNYADTVKGRFTISRDNAKNTVYLQMNSLKPEDTGVYSCAAAGGYGNSSRYWGQGTSVTVS

SEQ ID NO: 4035 - protein, 115 aa, synthetic construct
LVESGGGLVQPGGSLRLSCAASGFTLDSYAIGWFRQAPGKEREGVSYISSSGDSTNYADSVKGRFTISRDNAKNTVYLQMNSLKPEDSAVYSCAAAGGYRNSSRYWGQGTSVTVS

SEQ ID NO: 4036 - protein, 115 aa, synthetic construct
LVESGGGLVQPGGSLRLSCAASGFTLDSYAIGWFRQAPGKEREGVSYISSSGDSTNYADSVKGRFTISRDNAKNTVYLQMNSLKPEDSAVYYCAAAGGYGNSSRYWGQGTSVTVS

SEQ ID NO: 4037 - protein, 115 aa, synthetic construct
LVESGGGLVQPGGSLRLSCAASGFTLDSYAIGWFRQAPGKEREGVSYISSSGDSTNYADSVKGRFTISRDNAKNTVYLQMNSLKPEDSAVYYCAAAGGYRNSSRYWGQGTSVTVS

SEQ ID NO: 4038 - protein, 115 aa, synthetic construct
LVESGGGLVQPGGSLRLSCAASGFTLDSYAIGWFRQAPGKEREGVSYISSSGDSTNYADSVKGRFTISRDNAKNTVYLQMNSLKPEDTGVYSCAAAGGYGNSSRYWGQGTSVTVS

SEQ ID NO: 4039 - protein, 115 aa, synthetic construct
LVESGGGLVQPGGSLRLSCAASGFTLDSYAIGWFRQAPGKEREGVSYISSSGDSTNYADSVKGRFTVSRDNAKNTVYLQMNSLKPEDTGVYSCAAAGGYGNSSRYWGQGTSVTVS

SEQ ID NO: 4040 - protein, 115 aa, synthetic construct
LVESGGGLVQPGGSLRLSCAASGFTLDSYAIGWFRQAPGKEREGVSYISSSGDSTNYADTVKGRFTISRDNAKNTVYLQMNSLKPEDSAVYYCAAAGGYGNSSRYWGQGTSVTVS

SEQ ID NO: 4041 - protein, 115 aa, synthetic construct
LVESGGGLVQPGGSLRLSCAASGFTLDSYAIGWFRQAPGKEREGVSYISSSGDSTNYADTVKGRFTISRDNAKNTVYLQMNSLKPEDTGVYSCAAAGGYGNSSRYWGQGTSVTVS

SEQ ID NO: 4042 - protein, 115 aa, synthetic construct
LVESGGGLVQPGGSLRLSCAASGFTLDSYAIGWFRQAPGKEREGVSYISSSGGSTNYADTVKGRFTISRDNAKNTVYLQMNSLKPEDSAVYSCAAAGGYGNSSRYWGQGTSVTVS

SEQ ID NO: 4043 - protein, 115 aa, synthetic construct
LVESGGGLVQPGGSLRLSCAASGFTLDSYAIGWFRQAPGKEREGVSYISSSGGSTNYADTVKGRFTISRDNAKNTVYLQMNSLKPEDTGVYSCAAAGGYGNSSRYWGQGTSVTVS

SEQ ID NO: 4044 - protein, 115 aa, synthetic construct
LVESGGGLVQPGGSLRLSCAASGFTLDYFAIGWFRQAPGKEREGVSYISSSGDSTNYADSVKGRFTISRDNAKNTVYLQMNSLKPEDTAVYYCAAAGGYGNSSRYWGQGTSVTVS

SEQ ID NO: 4045 - protein, 115 aa, synthetic construct
LVESGGGLVQPGGSLRLSCAASGFTLDYFAIGWFRQAPGKEREGVSYISSSGDSTNYADSVKGRFTISRDNAKNTVYLQMNSLKPEDTAVYYCAAAGGYRNSSRYWGQGTSVTVS

SEQ ID NO: 4046 - protein, 115 aa, synthetic construct
LVESGGGLVQPGGSLRLSCAASGFTLDYFAIGWFRQAPGKEREGVSYISSSGDSTNYADSVKGRFTISRDNAKNTVYLQMNSLKPEDTGVYSCAAAGGYGNSSRYWGQGTSVTVS

SEQ ID NO: 4047 - protein, 115 aa, synthetic construct
LVESGGGLVQPGGSLRLSCAASGFTLDYFAIGWFRQAPGKEREGVSYISSSGDSTNYADSVKGRFTISRDNAKNTVYLQMNSLKPEDTGVYSCAAAGGYRNSSRYWGQGTSVTVS

SEQ ID NO: 4048 - protein, 115 aa, synthetic construct
LVESGGGLVQPGGSLRLSCAASGFTLDYFAIGWFRQAPGKEREGVSYISSSGDSTNYADTVKGRFTISRDNAKNTVYLQMNSLKPEDSAVYSCAAAGGYGNSSRYWGQGTSVTVS

SEQ ID NO: 4049 - protein, 115 aa, synthetic construct
LVESGGGLVQPGGSLRLSCAASGFTLDYFAIGWFRQAPGKEREGVSYISSSGDSTNYADTVKGRFTISRDNAKNTVYLQMNSLKPEDSAVYSCAAAGGYRNSSRYWGQGTSVTVS

SEQ ID NO: 4050 - protein, 115 aa, synthetic construct
LVESGGGLVQPGGSLRLSCAASGFTLDYFAIGWFRQAPGKEREGVSYISSSGDSTNYADTVKGRFTISRDNAKNTVYLQMNSLKPEDSAVYYCAAAGGYGNSSRYWGQGTSVTVS

SEQ ID NO: 4051 - protein, 115 aa, synthetic construct
LVESGGGLVQPGGSLRLSCAASGFTLDYFAIGWFRQAPGKEREGVSYISSSGDSTNYADTVKGRFTISRDNAKNTVYLQMNSLKPEDSAVYYCAAAGGYRNSSRYWGQGTSVTVS

SEQ ID NO: 4052 - protein, 115 aa, synthetic construct
LVESGGGLVQPGGSLRLSCAASGFTLDYFAIGWFRQAPGKEREGVSYISSSGDSTNYADTVKGRFTISRDNAKNTVYLQMNSLKPEDTAIYYCAAAGGYGNSSRYWGQGTSVTVS

SEQ ID NO: 4053 - protein, 115 aa, synthetic construct
LVESGGGLVQPGGSLRLSCAASGFTLDYFAIGWFRQAPGKEREGVSYISSSGDSTNYADTVKGRFTISRDNAKNTVYLQMNSLKPEDTAVYSCAAAGGYGNSSRYWGQGTSVTVS

SEQ ID NO: 4054 - protein, 115 aa, synthetic construct
LVESGGGLVQPGGSLRLSCAASGFTLDYFAIGWFRQAPGKEREGVSYISSSGDSTNYADTVKGRFTISRDNAKNTVYLQMNSLKPEDTAVYSCAAAGGYRNSSRYWGQGTSVTVS

SEQ ID NO: 4055 - protein, 115 aa, synthetic construct
LVESGGGLVQPGGSLRLSCAASGFTLDYFAIGWFRQAPGKEREGVSYISSSGDSTNYADTVKGRFTISRDNAKNTVYLQMNSLKPEDTAVYYCAAAGGYGNSSRYWGQGTSVTVS

SEQ ID NO: 4056 - protein, 115 aa, synthetic construct
LVESGGGLVQPGGSLRLSCAASGFTLDYFAIGWFRQAPGKEREGVSYISSSGDSTNYADTVKGRFTISRDNAKNTVYLQMNSLKPEDTGVYSCAAAGGYGNFSRYWGQGTSVTVS

SEQ ID NO: 4057 - protein, 115 aa, synthetic construct
LVESGGGLVQPGGSLRLSCAASGFTLDYFAIGWFRQAPGKEREGVSYISSSGDSTNYADTVKGRFTISRDNAKNTVYLQMNSLKPEDTGVYSCAAAGGYGNSSRHWGQGTSVTVS

SEQ ID NO: 4058 - protein, 115 aa, synthetic construct
LVESGGGLVQPGGSLRLSCAASGFTLDYFAIGWFRQAPGKEREGVSYISSSGDSTNYADTVKGRFTISRDNAKNTVYLQMNSLKPEDTGVYSCAAAGGYGNSSRYWGQGTSVTVS

SEQ ID NO: 4059 - protein, 115 aa, synthetic construct
LVESGGGLVQPGGSLRLSCAASGFTLDYFAIGWFRQAPGKEREGVSYISSSGDSTNYADTVKGRFTISRDNAKNTVYLQMNSLKPEDTGVYSCAAAGGYRNSSRYWGQGTSVTVS

SEQ ID NO: 4060 - protein, 115 aa, synthetic construct
LVESGGGLVQPGGSLRLSCAASGFTLDYFAIGWFRQAPGKEREGVSYISSSGDSTNYADTVKGRFTVSRDNAKNTVYLQMNSLKPEDSAVYYCAAAGGYRNSSRYWGQGTSVTVS

SEQ ID NO: 4061 - protein, 115 aa, synthetic construct
LVESGGGLVQPGGSLRLSCAASGFTLDYFAIGWFRQAPGKEREGVSYISSSGDSTNYADTVKGRFTVSRDNAKNTVYLQMNSLKPEDTGVYSCAAAGGYGNSSRYWGQGTSVTVS

SEQ ID NO: 4062 - protein, 115 aa, synthetic construct
LVESGGGLVQPGGSLRLSCAASGFTLDYYAIGWFRQAPGKEREGVAYISSSGDSTNYADSVKGRFTISRDNAKNTVYLQMNSLKPEDTGVYSCAAAGGYGNSSRYWGQGTSVTVS

SEQ ID NO: 4063 - protein, 115 aa, synthetic construct
LVESGGGLVQPGGSLRLSCAASGFTLDYYAIGWFRQAPGKEREGVSYISSSGDSTNYADGVKGRFTISRDNAKNTVYLQMNSLKPEDTGVYSCAAAGGYGNSSRYWGQGTSVTVS

SEQ ID NO: 4064 - protein, 115 aa, synthetic construct
LVESGGGLVQPGGSLRLSCAASGFTLDYYAIGWFRQAPGKEREGVSYISSSGDSTNYADSVKGRFTISRDNAKNTVSLQMNSLKPEDTGVYSCAAAGGYGNSSRYWGQGTSVTVS

SEQ ID NO: 4065 - protein, 115 aa, synthetic construct
LVESGGGLVQPGGSLRLSCAASGFTLDYYAIGWFRQAPGKEREGVSYISSSGDSTNYADSVKGRFTISRDNAKNTVYLQMHNLKPEDTAVYSCAAAGGYGNSSRYWGQGTSVTVS

SEQ ID NO: 4066 - protein, 115 aa, synthetic construct
LVESGGGLVQPGGSLRLSCAASGFTLDYYAIGWFRQAPGKEREGVSYISSSGDSTNYADSVKGRFTISRDNAKNTVYLQMNSLKPEDSAVYSCAAAGGYGNSSRYWGQGTSVTVS

SEQ ID NO: 4067 - protein, 115 aa, synthetic construct
LVESGGGLVQPGGSLRLSCAASGFTLDYYAIGWFRQAPGKEREGVSYISSSGDSTNYADSVKGRFTISRDNAKNTVYLQMNSLKPEDSAVYSCAAAGGYRNSSRFWGQGTSVTVS

SEQ ID NO: 4068 - protein, 115 aa, synthetic construct
LVESGGGLVQPGGSLRLSCAASGFTLDYYAIGWFRQAPGKEREGVSYISSSGDSTNYADSVKGRFTISRDNAKNTVYLQMNSLKPEDSAVYSCAAAGGYRNSSRYWGQGTSVTVS

SEQ ID NO: 4069 - protein, 115 aa, synthetic construct
LVESGGGLVQPGGSLRLSCAASGFTLDYYAIGWFRQAPGKEREGVSYISSSGDSTNYADSVKGRFTISRDNAKNTVYLQMNSLKPEDSAVYYCAAAGGYGNSSRYWGQGTSVTVS

SEQ ID NO: 4070 - protein, 115 aa, synthetic construct
LVESGGGLVQPGGSLRLSCAASGFTLDYYAIGWFRQAPGKEREGVSYISSSGDSTNYADSVKGRFTISRDNAKNTVYLQMNSLKPEDSAVYYCAAAGGYRNSSRYWGQGTSVTVS

SEQ ID NO: 4071 - protein, 115 aa, synthetic construct
LVESGGGLVQPGGSLRLSCAASGFTLDYYAIGWFRQAPGKEREGVSYISSSGDSTNYADSVKGRFTISRDNAKNTVYLQMNSLKPEDTAIYYCAAAGGYGNSSRYWGQGTSVTVS

SEQ ID NO: 4072 - protein, 111 aa, synthetic construct
LVESGGGLVQPGGSLRLSCAASGFTLDYYAIGWFRQAPGKEREGVSYISSSGDSTNYADSVKGRFTISRDNAKNTVYLQMNSLKPEDTAVYSCAAAGGFRYWGQGTLVTVS

SEQ ID NO: 4073 - protein, 115 aa, synthetic construct
LVESGGGLVQPGGSLRLSCAASGFTLDYYAIGWFRQAPGKEREGVSYISSSGDSTNYADSVKGRFTISRDNAKNTVYLQMNSLKPEDTAVYSCAAAGGYGNSSRYWGQGTSVTVS

SEQ ID NO: 4074 - protein, 115 aa, synthetic construct
LVESGGGLVQPGGSLRLSCAASGFTLDYYAIGWFRQAPGKEREGVSYISSSGDSTNYADSVKGRFTISRDNAKNTVYLQMNSLKPEDTAVYSCAAAGGYRNSSRYWGQGTSVTVS

SEQ ID NO: 4075 - protein, 115 aa, synthetic construct
LVESGGGLVQPGGSLRLSCAASGFTLDYYAIGWFRQAPGKEREGVSYISSSGDSTNYADSVKGRFTISRDNAKNTVYLQMNSLKPEDTAVYYCAAAGGYGNSSRYWGQGTSVTVS

SEQ ID NO: 4076 - protein, 115 aa, synthetic construct
LVESGGGLVQPGGSLRLSCAASGFTLDYYAIGWFRQAPGKEREGVSYISSSGDSTNYADSVKGRFTISRDNAKNTVYLQMNSLKPEDTAVYYCAAAGGYRNSSRYWGQGTSVTVS

SEQ ID NO: 4077 - protein, 115 aa, synthetic construct
LVESGGGLVQPGGSLRLSCAASGFTLDYYAIGWFRQAPGKEREGVSYISSSGDSTNYADSVKGRFTISRDNAKNTVYLQMNSLKPEDTAVYYCAAAGGYTNSSRYWGQGTSVTVS

SEQ ID NO: 4078 - protein, 115 aa, synthetic construct
LVESGGGLVQPGGSLRLSCAASGFTLDYYAIGWFRQAPGKEREGVSYISSSGDSTNYADSVKGRFTISRDNAKNTVYLQMNSLKPEDTGVYSCAAAGGYGNFSRYWGQGTSVTVS

SEQ ID NO: 4079 - protein, 115 aa, synthetic construct
LVESGGGLVQPGGSLRLSCAASGFTLDYYAIGWFRQAPGKEREGVSYISSSGDSTNYADSVKGRFTISRDNAKNTVYLQMNSLKPEDTGVYSCAAAGGYGNSSRHWGQGTSVTVS

SEQ ID NO: 4080 - protein, 115 aa, synthetic construct
LVESGGGLVQPGGSLRLSCAASGFTLDYYAIGWFRQAPGKEREGVSYISSSGDSTNYADSVKGRFTISRDNAKNTVYLQMNSLKPEDTGVYSCAAAGGYGNSSRYWGPGTSVTVS

SEQ ID NO: 4081 - protein, 115 aa, synthetic construct
LVESGGGLVQPGGSLRLSCAASGFTLDYYAIGWFRQAPGKEREGVSYISSSGDSTNYADSVKGRFTISRDNAKNTVYLQMNSLKPEDTGVYSCAAAGGYGNSSRYWGQGASVTVS

SEQ ID NO: 4082 - protein, 115 aa, synthetic construct
LVESGGGLVQPGGSLRLSCAASGFTLDYYAIGWFRQAPGKEREGVSYISSSGDSTNYADSVKGRFTISRDNAKNTVYLQMNSLKPEDTGVYSCAAAGGYGNSSRYWGQGTSVTVS

SEQ ID NO: 4083 - protein, 115 aa, synthetic construct
LVESGGGLVQPGGSLRLSCAASGFTLDYYAIGWFRQAPGKEREGVSYISSSGDSTNYADSVKGRFTISRDNAKNTVYLQMNSLKPEDTGVYSCAAAGGYGNSSRYWGQVTSVTVS

SEQ ID NO: 4084 - protein, 115 aa, synthetic construct
LVESGGGLVQPGGSLRLSCAASGFTLDYYAIGWFRQAPGKEREGVSYISSSGDSTNYADSVKGRFTISRDNAKNTVYLQMNSLKPEDTGVYSCAAAGGYRNSSRYWGQGTSVTVS

SEQ ID NO: 4085 - protein, 115 aa, synthetic construct
LVESGGGLVQPGGSLRLSCAASGFTLDYYAIGWFRQAPGKEREGVSYISSSGDSTNYADSVKGRFTISRDNAKNTVYLQMNSLKPEDTGVYSCAAAGGYTNSSRYWGQGTSVTVS

SEQ ID NO: 4086 - protein, 115 aa, synthetic construct
LVESGGGLVQPGGSLRLSCAASGFTLDYYAIGWFRQAPGKEREGVSYISSSGDSTNYADSVKGRFTISRDNAKNTVYLQMNSLKPEDTGVYYCAAAGGYGNSSRYWGQGTSVTVS

SEQ ID NO: 4087 - protein, 115 aa, synthetic construct
LVESGGGLVQPGGSLRLSCAASGFTLDYYAIGWFRQAPGKEREGVSYISSSGDSTNYADSVKGRFTISRDNAKNTVYLQMNSLKPEDTGVYYCAAAGGYRNSSRYWGQGTSVTVS

SEQ ID NO: 4088 - protein, 115 aa, synthetic construct
LVESGGGLVQPGGSLRLSCAASGFTLDYYAIGWFRQAPGKEREGVSYISSSGDSTNYADSVKGRFTVSRDNAKNTVYLQMNSLKPEDSAVYSCAAAGGYRNSSRYWGQGTSVTVS

SEQ ID NO: 4089 - protein, 115 aa, synthetic construct
LVESGGGLVQPGGSLRLSCAASGFTLDYYAIGWFRQAPGKEREGVSYISSSGDSTNYADSVKGRFTVSRDNAKNTVYLQMNSLKPEDSAVYYCAAAGGYRNSSRYWGQGTSVTVS

SEQ ID NO: 4090 - protein, 115 aa, synthetic construct
LVESGGGLVQPGGSLRLSCAASGFTLDYYAIGWFRQAPGKEREGVSYISSSGDSTNYADSVKGRFTVSRDNAKNTVYLQMNSLKPEDTGVYSCAAAGGYGNSSRYWGQGTSVTVS

SEQ ID NO: 4091 - protein, 115 aa, synthetic construct
LVESGGGLVQPGGSLRLSCAASGFTLDYYAIGWFRQAPGKEREGVSYISSSGDSTNYADTVKGRFTISRDNAKNTVYLQMHNLKPEDTAVYSCAAAGGYGNSSRYWGQGTSVTVS

SEQ ID NO: 4092 - protein, 115 aa, synthetic construct
LVESGGGLVQPGGSLRLSCAASGFTLDYYAIGWFRQAPGKEREGVSYISSSGDSTNYADTVKGRFTISRDNAKNTVYLQMNSLKPEDSAVYSCAAAGGYGNSSRYWGQGTSVTVS

SEQ ID NO: 4093 - protein, 115 aa, synthetic construct
LVESGGGLVQPGGSLRLSCAASGFTLDYYAIGWFRQAPGKEREGVSYISSSGDSTNYADTVKGRFTISRDNAKNTVYLQMNSLKPEDSAVYSCAAAGGYRNSSRFWGQGTSVTVS

SEQ ID NO: 4094 - protein, 115 aa, synthetic construct
LVESGGGLVQPGGSLRLSCAASGFTLDYYAIGWFRQAPGKEREGVSYISSSGDSTNYADTVKGRFTISRDNAKNTVYLQMNSLKPEDSAVYSCAAAGGYRNSSRYWGQGTSVTVS

SEQ ID NO: 4095 - protein, 115 aa, synthetic construct
LVESGGGLVQPGGSLRLSCAASGFTLDYYAIGWFRQAPGKEREGVSYISSSGDSTNYADTVKGRFTISRDNAKNTVYLQMNSLKPEDSAVYYCAAAGGYGNSSRYWGQGTSVTVS

SEQ ID NO: 4096 - protein, 115 aa, synthetic construct
LVESGGGLVQPGGSLRLSCAASGFTLDYYAIGWFRQAPGKEREGVSYISSSGDSTNYADTVKGRFTISRDNAKNTVYLQMNSLKPEDSAVYYCAAAGGYRNSSRYWGQGTSVTVS

SEQ ID NO: 4097 - protein, 115 aa, synthetic construct
LVESGGGLVQPGGSLRLSCAASGFTLDYYAIGWFRQAPGKEREGVSYISSSGDSTNYADTVKGRFTISRDNAKNTVYLQMNSLKPEDTAIYYCAAAGGYGNSSRYWGQGTSVTVS

SEQ ID NO: 4098 - protein, 115 aa, synthetic construct
LVESGGGLVQPGGSLRLSCAASGFTLDYYAIGWFRQAPGKEREGVSYISSSGDSTNYADTVKGRFTISRDNAKNTVYLQMNSLKPEDTAIYYCAAAGGYRNSSRYWGQGTSVTVS

SEQ ID NO: 4099 - protein, 115 aa, synthetic construct
LVESGGGLVQPGGSLRLSCAASGFTLDYYAIGWFRQAPGKEREGVSYISSSGDSTNYADTVKGRFTISRDNAKNTVYLQMNSLKPEDTAVYSCAAAGGYGNSSRYWGQGTSVTVS

SEQ ID NO: 4100 - protein, 115 aa, synthetic construct
LVESGGGLVQPGGSLRLSCAASGFTLDYYAIGWFRQAPGKEREGVSYISSSGDSTNYADTVKGRFTISRDNAKNTVYLQMNSLKPEDTAVYSCAAAGGYRNSSRYWGQGTSVTVS

SEQ ID NO: 4101 - protein, 115 aa, synthetic construct
LVESGGGLVQPGGSLRLSCAASGFTLDYYAIGWFRQAPGKEREGVSYISSSGDSTNYADTVKGRFTISRDNAKNTVYLQMNSLKPEDTAVYYCAAAGGYGNSSRYWGQGTSVTVS

SEQ ID NO: 4102 - protein, 115 aa, synthetic construct
LVESGGGLVQPGGSLRLSCAASGFTLDYYAIGWFRQAPGKEREGVSYISSSGDSTNYADTVKGRFTISRDNAKNTVYLQMNSLKPEDTAVYYCAAAGGYTNSSRYWGQGTSVTVS

SEQ ID NO: 4103 - protein, 115 aa, synthetic construct
LVESGGGLVQPGGSLRLSCAASGFTLDYYAIGWFRQAPGKEREGVSYISSSGDSTNYADTVKGRFTISRDNAKNTVYLQMNSLKPEDTGVYSCAAAGGYGNFSRYWGQGTSVTVS

SEQ ID NO: 4104 - protein, 115 aa, synthetic construct
LVESGGGLVQPGGSLRLSCAASGFTLDYYAIGWFRQAPGKEREGVSYISSSGDSTNYADTVKGRFTISRDNAKNTVYLQMNSLKPEDTGVYSCAAAGGYGNSSRHWGQGTSVTVS

SEQ ID NO: 4105 - protein, 115 aa, synthetic construct
LVESGGGLVQPGGSLRLSCAASGFTLDYYAIGWFRQAPGKEREGVSYISSSGDSTNYADTVKGRFTISRDNAKNTVYLQMNSLKPEDTGVYSCAAAGGYGNSSRYWGQGASVTVS

SEQ ID NO: 4106 - protein, 115 aa, synthetic construct
LVESGGGLVQPGGSLRLSCAASGFTLDYYAIGWFRQAPGKEREGVSYISSSGDSTNYADTVKGRFTISRDNAKNTVYLQMNSLKPEDTGVYSCAAAGGYGNSSRYWGQGTSVTVS

SEQ ID NO: 4107 - protein, 115 aa, synthetic construct
LVESGGGLVQPGGSLRLSCAASGFTLDYYAIGWFRQAPGKEREGVSYISSSGDSTNYADTVKGRFTISRDNAKNTVYLQMNSLKPEDTGVYSCAAAGGYRNSSRYWGQGTSVTVS

SEQ ID NO: 4108 - protein, 115 aa, synthetic construct
LVESGGGLVQPGGSLRLSCAASGFTLDYYAIGWFRQAPGKEREGVSYISSSGDSTNYADTVKGRFTISRDNAKNTVYLQMNSLKPEDTGVYYCAAAGGYGNSSRYWGQGTSVTVS

SEQ ID NO: 4109 - protein, 115 aa, synthetic construct
LVESGGGLVQPGGSLRLSCAASGFTLDYYAIGWFRQAPGKEREGVSYISSSGDSTNYADTVKGRFTISRDNAKNTVYLQMNSLKPEDTGVYYCAAAGGYRNSSRYWGQGTSVTVS

SEQ ID NO: 4110 - protein, 115 aa, synthetic construct
LVESGGGLVQPGGSLRLSCAASGFTLDYYAIGWFRQAPGKEREGVSYISSSGDSTNYADTVKGRFTISRNNAKNTVYLQMHSLKPEDTGVYSCAAAGGYGNSSRYWGQGTSVTVS

SEQ ID NO: 4111 - protein, 115 aa, synthetic construct
LVESGGGLVQPGGSLRLSCAASGFTLDYYAIGWFRQAPGKEREGVSYISSSGDSTNYADTVKGRFTISRNNAKNTVYLQMNSLKPEDTGVYSCAAAGGYGNSSRYWGQGTSVTVS

SEQ ID NO: 4112 - protein, 115 aa, synthetic construct
LVESGGGLVQPGGSLRLSCAASGFTLDYYAIGWFRQAPGKEREGVSYISSSGDSTNYADTVKGRFTVSRDNAKNTVYLQMNSLKPEDSAVYYCAAAGGYGNSSRYWGQGTSVTVS

SEQ ID NO: 4113 - protein, 115 aa, synthetic construct
LVESGGGLVQPGGSLRLSCAASGFTLDYYAIGWFRQAPGKEREGVSYISSSGDSTNYADTVKGRFTVSRDNAKNTVYLQMNSLKPEDSAVYYCAAAGGYRNSSRYWGQGTSVTVS

SEQ ID NO: 4114 - protein, 115 aa, synthetic construct
LVESGGGLVQPGGSLRLSCAASGFTLDYYAIGWFRQAPGKEREGVSYISSSGDSTNYADTVKGRFTVSRDNAKNTVYLQMNSLKPEDTGVYSCAAAGGYGNSSRYWGQGTSVTVS

SEQ ID NO: 4115 - protein, 115 aa, synthetic construct
LVESGGGLVQPGGSLRLSCAASGFTLDYYAIGWFRQAPGKEREGVSYISSSGDSTNYAESVKGRFTISRDNAKNTVYLQMNSLKPEDTGVYSCAAAGGYGNSSRYWGQGTSVTVS

SEQ ID NO: 4116 - protein, 115 aa, synthetic construct
LVESGGGLVQPGGSLRLSCAASGFTLDYYAIGWSRQAPGKEREGVSYISSSGDSTNYADSVKGRFTISRDNAKNTVYLQMNSLKPEDTGVYSCAAAGGYGNSSRYWGQGTSVTVS

SEQ ID NO: 4117 - protein, 115 aa, synthetic construct
LVESGGGLVQPGGSLRLSCAASGFTLDYYAIGWSRQAPGKEREGVSYISSSGDSTNYADTVKGRFTISRDNAKNTVYLQMNSLKPEDTAVYSCAAAGGYGNSSRYWGQGTSVTVS

SEQ ID NO: 4118 - protein, 115 aa, synthetic construct
LVESGGGLVQPGGSLRLSCAASGFTLDYYAIGWSRQAPGKEREGVSYISSSGDSTNYADTVKGRFTISRDNAKNTVYLQMNSLKPEDTGVYSCAAAGGYGNSSRYWGQGTSVTVS

SEQ ID NO: 4119 - protein, 115 aa, synthetic construct
LVESGGGLVQPGGSLRLSCAASGVTLDYYAIGWFRQAPGKEREGVSYISSSGDSTNYADTVKGRFTISRDNAKNTVYLQMNSLKPEDTGVYSCAAAGGYGNSSRYWGQGTSVTVS

SEQ ID NO: 4120 - protein, 116 aa, synthetic construct
QLVESGGGLVQPGGSLRLSCAASGFSLDYYAIGWFRQAPGKEREGVSYISSSGGSTNYADSVKGRFTISRDNAKNTVYLQMNSLKPEDSAVYSCAAAGGYGNSSRYWGQGTSVTVS

SEQ ID NO: 4121 - protein, 116 aa, synthetic construct
QLVESGGGLVQPGGSLRLSCAASGFSLDYYAIGWFRQAPGKEREGVSYISSSGGSTNYADSVKGRFTISRDNAKNTVYLQMNSLKPEDSAVYSCAAAGGYRNSSRFWGQGTSVTVS

SEQ ID NO: 4122 - protein, 116 aa, synthetic construct
QLVESGGGLVQPGGSLRLSCAASGFSLDYYAIGWFRQAPGKEREGVSYISSSGGSTNYADSVKGRFTISRDNAKNTVYLQMNSLKPEDSAVYSCAAAGGYRNSSRYWGQGTSVTVS

SEQ ID NO: 4123 - protein, 116 aa, synthetic construct
QLVESGGGLVQPGGSLRLSCAASGFSLDYYAIGWFRQAPGKEREGVSYISSSGGSTNYADSVKGRFTVSRDNAKNTVYLQMNSLKPEDSAVYSCAAAGGYGNSSRYWGQGTSVTVS

SEQ ID NO: 4124 - protein, 116 aa, synthetic construct
QLVESGGGLVQPGGSLRLSCAASGFSLDYYAIGWFRQAPGKEREGVSYISSSGGSTNYADSVKGRFTVSRDNAKNTVYLQMNSLKPEDTAVYSCAAAGGYGNSSRYWGQGTSVTVS

SEQ ID NO: 4125 - protein, 116 aa, synthetic construct
QLVESGGGLVQPGGSLRLSCAASGFSLDYYAIGWFRQAPGKEREGVSYISSSGGSTNYADSVKGRFTVSRDNAKNTVYLQMNSLKPEDTAVYSCAAAGGYRNSSRYWGQGTSVTVS

SEQ ID NO: 4126 - protein, 114 aa, synthetic construct
VESGGGLVQPGGSLRLSCAASGFTLDYYAIGWFRQAPGKEREGVSYISSSGGSTNYADSVKGRFTISRDNAKNTVYLQMNSLKPEDSAVYSCAAAGGYRNSSRYWGQGTSVTVS

SEQ ID NO: 4127 - protein, 117 aa, synthetic construct
VQLVESGGGLVQAGGSLRLSCAASGRNFSSYPMGWFRQAPGKEREGVSYISSSGGSTNYADSVKGRFTISRDNAKNTVYLQMNSLKPEDSAVYYCAAAGGYGNSSRYWGQGTSVTVS

SEQ ID NO: 4128 - protein, 117 aa, synthetic construct
VQLVESGGGLVQPGGSLRLSCAASGFTLDYYAIGWFRQAPGKEREGVSYISSSGGSTNYADSVKGRFTISRDNAKNTVYLQMNSLKPEDSAVYSCAAAGGYRNSSRYWGQGTSVTVS

SEQ ID NO: 4129 - protein, 8 aa, synthetic construct
EFTLDYYA

SEQ ID NO: 4130 - protein, 8 aa, synthetic construct
GFNLDYYA

SEQ ID NO: 4131 - protein, 8 aa, synthetic construct
GFTLDYCA

SEQ ID NO: 4132 - protein, 8 aa, synthetic construct
GFTLDYHA

SEQ ID NO: 4133 - protein, 8 aa, synthetic construct
GFTLDYYS

SEQ ID NO: 4134 - protein, 8 aa, synthetic construct
GFTLDYYV

SEQ ID NO: 4135 - protein, 8 aa, synthetic construct
GFTLGYYA

SEQ ID NO: 4136 - protein, 8 aa, synthetic construct
GFTLVYYA

SEQ ID NO: 4137 - protein, 8 aa, synthetic construct
GFTLYYYA

SEQ ID NO: 4138 - protein, 8 aa, synthetic construct
GFTQDYYA

SEQ ID NO: 4139 - protein, 8 aa, synthetic construct
GFTRDYYA

SEQ ID NO: 4140 - protein, 8 aa, synthetic construct
GLTLDYYA

SEQ ID NO: 4141 - protein, 8 aa, synthetic construct
GSTLDYYA

SEQ ID NO: 4142 - protein, 8 aa, synthetic construct
GYTLDYYA

SEQ ID NO: 4143 - protein, 8 aa, synthetic construct
RFTLDYYA

SEQ ID NO: 4144 - protein, 8 aa, synthetic construct
VFTLDYYA

SEQ ID NO: 4145 - protein, 8 aa, synthetic construct
WFTLDYYA

SEQ ID NO: 4146 - protein, 8 aa, synthetic construct
GFTLDYYT

SEQ ID NO: 4147 - protein, 8 aa, synthetic construct
GFALDYYA

SEQ ID NO: 4148 - protein, 9 aa, synthetic construct
SGFTFDDSD

SEQ ID NO: 4149 - protein, 9 aa, synthetic construct
SGFTFDVSD

SEQ ID NO: 4150 - protein, 8 aa, synthetic construct
ISGSGGST

SEQ ID NO: 4151 - protein, 8 aa, synthetic construct
ISSPGGST

SEQ ID NO: 4152 - protein, 8 aa, synthetic construct
ISSSCGST

SEQ ID NO: 4153 - protein, 8 aa, synthetic construct
ISSSDGST

SEQ ID NO: 4154 - protein, 8 aa, synthetic construct
ISSSGCST

SEQ ID NO: 4155 - protein, 8 aa, synthetic construct
ISSSGGPT

SEQ ID NO: 4156 - protein, 8 aa, synthetic construct
ISSSSGST

SEQ ID NO: 4157 - protein, 8 aa, synthetic construct
ISSSVGST

SEQ ID NO: 4158 - protein, 8 aa, synthetic construct
ISSTGGST

SEQ ID NO: 4159 - protein, 8 aa, synthetic construct
TVSSDGRT

SEQ ID NO: 4160 - protein, 8 aa, synthetic construct
VSSDGRTL

SEQ ID NO: 4161 - protein, 7 aa, synthetic construct
IRSDGRT

SEQ ID NO: 4162 - protein, 7 aa, synthetic construct
IFSDGRT

SEQ ID NO: 4163 - protein, 7 aa, synthetic construct
ISSDGRT

SEQ ID NO: 4164 - protein, 9 aa, synthetic construct
STVSSDGRT

SEQ ID NO: 4165 - protein, 12 aa, synthetic construct
AAAGDYGNSSRY

SEQ ID NO: 4166 - protein, 12 aa, synthetic construct
AAAGGCGNSSRY

SEQ ID NO: 4167 - protein, 12 aa, synthetic construct
AAAGGYGDSSRY

SEQ ID NO: 4168 - protein, 12 aa, synthetic construct
AAAGGYGHSSRY

SEQ ID NO: 4169 - protein, 12 aa, synthetic construct
AAAGGYGNASRY

SEQ ID NO: 4170 - protein, 12 aa, synthetic construct
AAAGGYGNPSRY

SEQ ID NO: 4171 - protein, 12 aa, synthetic construct
AAAGGYGNSPRH

SEQ ID NO: 4172 - protein, 12 aa, synthetic construct
AAAGGYGNSSCY

SEQ ID NO: 4173 - protein, 12 aa, synthetic construct
AAAGGYGNSSHY

SEQ ID NO: 4174 - protein, 12 aa, synthetic construct
AAAGGYGNSSLY

SEQ ID NO: 4175 - protein, 12 aa, synthetic construct
AAAGGYGNSSRD

SEQ ID NO: 4176 - protein, 12 aa, synthetic construct
AAAGGYGNSSRE

SEQ ID NO: 4177 - protein, 12 aa, synthetic construct
AAAGGYGNSSRS

SEQ ID NO: 4178 - protein, 12 aa, synthetic construct
AAAGGYGNTSRY

SEQ ID NO: 4179 - protein, 12 aa, synthetic construct
AAARGYGNSSRY

SEQ ID NO: 4180 - protein, 12 aa, synthetic construct
AAAWGYGNSSRY

SEQ ID NO: 4181 - protein, 12 aa, synthetic construct
AAVGGYGNSSRY

SEQ ID NO: 4182 - protein, 12 aa, synthetic construct
ATAGGYGNSSRY

SEQ ID NO: 4183 - protein, 12 aa, synthetic construct
EAAGGYGNSSRY

SEQ ID NO: 4184 - protein, 12 aa, synthetic construct
SAAGGYGNSSRY

SEQ ID NO: 4185 - protein, 12 aa, synthetic construct
VAAGGYGNSSRY

SEQ ID NO: 4186 - protein, 12 aa, synthetic construct
TAAGGYGNSSRY

SEQ ID NO: 4187 - protein, 14 aa, synthetic construct
KAYGYDENYFAMAY

SEQ ID NO: 4188 - protein, 14 aa, synthetic construct
RAYGYDENYSAVDY

SEQ ID NO: 4189 - protein, 111 aa, synthetic construct
EVQLVESGGGSVEAGGSLRLSCTASGFTFDDSDMGWYRQAPGNECELVSTVSSDGGTYYADSVKGRFTISQDNAKNTVYLQMNSLKPEDTAVYYCAADWPPGGQGTLVTVS

SEQ ID NO: 4190 - protein, 111 aa, synthetic construct
EVQLVESGGGSVEAGGSLRLSCTASGFTFDDSDMGWYRQAPGNECELVSTVSSDGRTLYADSVKGRFSISQDNAKNTVYLQMNSLKPEDTAVYYCAADWPPGGQGTLVTVS

SEQ ID NO: 4191 - protein, 111 aa, synthetic construct
EVQLVESGGGSVEAGGSLRLSCTASGFTFDDSDMGWYRQAPGNECELVSTVSSDGRTLYADSVKGRFTISQDNAKNTIYLQMNSLKPEDTAMYYCAADWPPGGQGTLVTVS

SEQ ID NO: 4192 - protein, 111 aa, synthetic construct
EVQLVESGGGSVEAGGSLRLSCTASGFTFDDSDMGWYRQAPGNECELVSTVSSDGRTLYADSVKGRFTISQDNAKNTIYLQMNSLKPEDTAVYYCAADWPPGGQGTLVTVS

SEQ ID NO: 4193 - protein, 111 aa, synthetic construct
EVQLVESGGGSVEAGGSLRLSCTASGFTFDDSDMGWYRQAPGNECELVSTVSSDGRTLYADSVKGRFTISQDNAKNTVYLQMNSLKPEDTAVYYCAADWPPGGQGTLVTVS

SEQ ID NO: 4194 - protein, 111 aa, synthetic construct
EVQLVESGGGSVEAGGSLRLSCTASGFTFDDSDMGWYRQAPGNERELVSTIRSDGRTLYADSVKGRFTISQDNAKNTVYLQMNSLKPEDTAVYYCAADWPPGGQGTLVTVS

SEQ ID NO: 4195 - protein, 111 aa, synthetic construct
EVQLVESGGGSVEAGGSLRLSCTASGFTFDDSDMGWYRQAPGNERELVSTISSDGRTLYADSVKGRFTISQDNAKNTVYLQMNSLKPEDTAVYYCAADWPPGGQGTLVTVS

SEQ ID NO: 4196 - protein, 111 aa, synthetic construct
EVQLVESGGGSVEAGGSLRLSCTASGFTFDDSDMGWYRQAPGNERELVSTVSSDGRTLYADSVKGRFTISQDNAKNTIYLQMNSLKPEDTAVYYCAADWPPGGQGTLVTVS

SEQ ID NO: 4197 - protein, 111 aa, synthetic construct
EVQLVESGGGSVEAGGSLRLSCTASGFTFDDSDMGWYRQAPGNERELVSTVSSDGRTLYADSVKGRFTISQDNAKNTVYLQMNSLKPEDTAVYYCAADWPPGGQGTLVTVS

SEQ ID NO: 4198 - protein, 111 aa, synthetic construct
EVQLVESGGGSVEAGGSLRLSCTASGFTFDDSDMGWYRQARGNECELVSTVSSDGRTLYADSVKGRFTISQDNAKNTVYLQMNSLKPEDTAVYYCAADWPPGGQGTLVTVS

SEQ ID NO: 4199 - protein, 111 aa, synthetic construct
EVQLVESGGGSVEAGGSLRLSCTASGFTFDDSDMGWYRQARGNERELVSTISSDGRTLYADSVKGRFTISQDNAKNTVYLQMNSLKPEDTAVYYCAADWPPGGQGTLVTVS

SEQ ID NO: 4200 - protein, 111 aa, synthetic construct
EVQLVESGGGSVEAGGSLRLSCTASGFTFDDSDMGWYRQARGNERELVSTVSSDGRTLYADSVKGRFTISQDNAKNTIYLQMNSLKPEDTAVYYCAADWPPGGQGTLVTVS

SEQ ID NO: 4201 - protein, 111 aa, synthetic construct
EVQLVESGGGSVEAGGSLRLSCTASGFTFDDSDMGWYRQARGNERELVSTVSSDGRTLYADSVKGRFTISQDNAKNTVYLQMNSLKPEDTAVYYCAADWPPGGQGTLVTVS

SEQ ID NO: 4202 - protein, 111 aa, synthetic construct
EVQLVESGGGSVEAGGSLRLSCTASGFTFDVSDMGWYRQAPGNECELVSTVSSDGRTLYADSVKGRFTISQDNAKNTIYLQMNSLKPEDTAVYYCAADWPPGGQGTLVTVS

SEQ ID NO: 4203 - protein, 111 aa, synthetic construct
EVQLVESGGGSVEAGGSLRLSCTASGFTFDVSDMGWYRQAPGNECELVSTVSSDGRTLYADSVKGRFTISQDNAKNTVYLQMNSLKPEDTAVYYCAADWPPGGQGTLVTVS

SEQ ID NO: 4204 - protein, 111 aa, synthetic construct
EVQLVESGGGSVEAGGSLRLSCTASGFTFDVSDMGWYRQAPGNERELVSTISSDGRTLYADSVKGRFTISQDNAKNTVYLQMNSLKPEDTAVYYCAADWPPGGQGTLVTVS

SEQ ID NO: 4205 - protein, 111 aa, synthetic construct
EVQLVESGGGSVEAGGSLRLSCTASGFTFDVSDMGWYRQAPGNERELVSTVSSDGRTLYADSVKGRFTISQDNAKNTVYLQMNSLKPEDTAVYYCAADWPPGGQGTLVTVS

SEQ ID NO: 4206 - protein, 111 aa, synthetic construct
EVQLVESGGGSVEAGGSLRLSRTASGFTFDDSDMGWYRQAPGNECELVSTVSSDGRTLYADSVKGRFTISQDNAKNTVYLQMNSLKPEDTAVYYCAADWPPGGQGTLVTVS

SEQ ID NO: 4207 - protein, 111 aa, synthetic construct
EVQLVESGGGSVQAGGSLRLSCTASGFTFDDSDMGWYRQAPGNECELVSTISSDGRTLYADSVKGRFTISQDNAKNTVYLQMNSLKPEDTAVYYCAADWPPGGQGTLVTVS

SEQ ID NO: 4208 - protein, 111 aa, synthetic construct
EVQLVESGGGSVQAGGSLRLSCTASGFTFDDSDMGWYRQAPGNECELVSTVSSDGRTLYADSVKGRFSISQDNAKNTVYLQMNSLKPEDTAVYYCAADWPPGGQGTLVTVS

SEQ ID NO: 4209 - protein, 111 aa, synthetic construct
EVQLVESGGGSVQAGGSLRLSCTASGFTFDDSDMGWYRQAPGNECELVSTVSSDGRTLYADSVKGRFTISQDNAKNTIYLQMNSLKPEDTAMYYCAADWPPGGQGTLVTVS

SEQ ID NO: 4210 - protein, 111 aa, synthetic construct
EVQLVESGGGSVQAGGSLRLSCTASGFTFDDSDMGWYRQAPGNECELVSTVSSDGRTLYADSVKGRFTISQDNAKNTIYLQMNSLKPEDTAVYYCAADWPPGGQGTLVTVS

SEQ ID NO: 4211 - protein, 111 aa, synthetic construct
EVQLVESGGGSVQAGGSLRLSCTASGFTFDDSDMGWYRQAPGNECELVSTVSSDGRTLYADSVKGRFTISQDNAKNTVYLQMNSLKPEDTAMYYCAADWPPGGQGTLVTVS

SEQ ID NO: 4212 - protein, 111 aa, synthetic construct
EVQLVESGGGSVQAGGSLRLSCTASGFTFDDSDMGWYRQAPGNECELVSTVSSDGRTLYVDSVKGRFTISQDNAKNTVYLQMNSLKPEDTAVYYCAADWPPGGQGTLVTVS

SEQ ID NO: 4213 - protein, 111 aa, synthetic construct
EVQLVESGGGSVQAGGSLRLSCTASGFTFDDSDMGWYRQAPGNERELVATIRSDGRTLYADSVKGRFSISQDNAKNTVYLQMNSLKPEDTAVYYCAADWPPGGQGTLVTVS

SEQ ID NO: 4214 - protein, 111 aa, synthetic construct
EVQLVESGGGSVQAGGSLRLSCTASGFTFDDSDMGWYRQAPGNERELVATIRSDGRTLYADSVKGRFTISQDNAKNTVYLQMNSLKPEDTAVYYCAADWPPGGQGTLVTVS

SEQ ID NO: 4215 - protein, 111 aa, synthetic construct
EVQLVESGGGSVQAGGSLRLSCTASGFTFDDSDMGWYRQAPGNERELVATVSSDGRTLYADSVKGRFTISQDNAKNTVYLQMNSLKPEDTAVYYCAADWPPGGQGTLVTVS

SEQ ID NO: 4216 - protein, 111 aa, synthetic construct
EVQLVESGGGSVQAGGSLRLSCTASGFTFDDSDMGWYRQAPGNERELVSTIFSDGRTLYADSVKGRFTISQDNAKNTVYLQMNSLKPEDTAVYYCAADWPPGGQGTLVTVS

SEQ ID NO: 4217 - protein, 111 aa, synthetic construct
EVQLVESGGGSVQAGGSLRLSCTASGFTFDDSDMGWYRQAPGNERELVSTIRSDGRTLYADSVKGRFTISQDNAKNTIYLQMNSLKPEDTAVYYCAADWPPGGQGTLVTVS

SEQ ID NO: 4218 - protein, 111 aa, synthetic construct
EVQLVESGGGSVQAGGSLRLSCTASGFTFDDSDMGWYRQAPGNERELVSTIRSDGRTLYADSVKGRFTISQDNAKNTVYLQMNSLKPEDTAVYYCAADWPPGGQGTLVTVS

SEQ ID NO: 4219 - protein, 111 aa, synthetic construct
EVQLVESGGGSVQAGGSLRLSCTASGFTFDDSDMGWYRQAPGNERELVSTISSDGRTLYADSVKGRFTISQDNAKNTIYLQMNSLKPEDTAVYYCAADWPPGGQGTLVTVS

SEQ ID NO: 4220 - protein, 111 aa, synthetic construct
EVQLVESGGGSVQAGGSLRLSCTASGFTFDDSDMGWYRQAPGNERELVSTISSDGRTLYADSVKGRFTISQDNAKNTVYLQMNSLKPEDTAVYYCAADWPPGGQGTLVTVS

SEQ ID NO: 4221 - protein, 111 aa, synthetic construct
EVQLVESGGGSVQAGGSLRLSCTASGFTFDDSDMGWYRQAPGNERELVSTVSSDGRTLYADSVKGRFSISQDNAKNTVYLQMNSLKPEDTAVYYCAADWPPGGQGTLVTVS

SEQ ID NO: 4222 - protein, 111 aa, synthetic construct
EVQLVESGGGSVQAGGSLRLSCTASGFTFDDSDMGWYRQAPGNERELVSTVSSDGRTLYADSVKGRFTISQDNAKNTIYLQMNSLKPEDTAMYYCAADWPPGGQGTLVTVS

SEQ ID NO: 4223 - protein, 111 aa, synthetic construct
EVQLVESGGGSVQAGGSLRLSCTASGFTFDDSDMGWYRQAPGNERELVSTVSSDGRTLYADSVKGRFTISQDNAKNTIYLQMNSLKPEDTAVYYCAADWPPGGQGTLVTVS

SEQ ID NO: 4224 - protein, 111 aa, synthetic construct
EVQLVESGGGSVQAGGSLRLSCTASGFTFDDSDMGWYRQAPGNERELVSTVSSDGRTLYADSVKGRFTISQDNAKNTVYLQMNSLKPEDTAVYYCAADWPPGGQGTLVTVS

SEQ ID NO: 4225 - protein, 111 aa, synthetic construct
EVQLVESGGGSVQAGGSLRLSCTASGFTFDDSDMGWYRQARGNECELVSTVSSDGRTLYADSVKGRFTISQDNAKNTIYLQMNSLKPEDTAVYYCAADWPPGGQGTLVTVS

SEQ ID NO: 4226 - protein, 111 aa, synthetic construct
EVQLVESGGGSVQAGGSLRLSCTASGFTFDDSDMGWYRQARGNECELVSTVSSDGRTLYADSVKGRFTISQDNAKNTVYLQMNSLKPEDTAVYYCAADWPPGGQGTLVTVS

SEQ ID NO: 4227 - protein, 111 aa, synthetic construct
EVQLVESGGGSVQAGGSLRLSCTASGFTFDDSDMGWYRQARGNERELVSTISSDGRTLYADSVKGRFTISQDNAKNTIYLQMNSLKPEDTAVYYCAADWPPGGQGTLVTVS

SEQ ID NO: 4228 - protein, 111 aa, synthetic construct
EVQLVESGGGSVQAGGSLRLSCTASGFTFDDSDMGWYRQARGNERELVSTISSDGRTLYADSVKGRFTISQDNAKNTVYLQMNSLKPEDTAVYYCAADWPPGGQGTLVTVS

SEQ ID NO: 4229 - protein, 111 aa, synthetic construct
EVQLVESGGGSVQAGGSLRLSCTASGFTFDDSDMGWYRQARGNERELVSTVSSDGRTLYADSVKGRFSISQDNAKNTVYLQMNSLKPEDTAVYYCAADWPPGGQGTLVTVS

SEQ ID NO: 4230 - protein, 111 aa, synthetic construct
EVQLVESGGGSVQAGGSLRLSCTASGFTFDDSDMGWYRQARGNERELVSTVSSDGRTLYADSVKGRFTISQDNAKNTIYLQMNSLKPEDTAMYYCAADWPPGGQGTLVTVS

SEQ ID NO: 4231 - protein, 111 aa, synthetic construct
EVQLVESGGGSVQAGGSLRLSCTASGFTFDDSDMGWYRQARGNERELVSTVSSDGRTLYADSVKGRFTISQDNAKNTIYLQMNSLKPEDTAVYYCAADWPPGGQGTLVTVS

SEQ ID NO: 4232 - protein, 111 aa, synthetic construct
EVQLVESGGGSVQAGGSLRLSCTASGFTFDDSDMGWYRQARGNERELVSTVSSDGRTLYADSVKGRFTISQDNAKNTVYLQMNSLKPEDTAVYYCAADWPPGGQGTLVTVS

SEQ ID NO: 4233 - protein, 111 aa, synthetic construct
EVQLVESGGGSVQAGGSLRLSCTASGFTFDVSDMGWYRQAPGNECELVSTVSSDGRTLYADSVKGRFSISQDNAKNTVYLQMNSLKPEDTAVYYCAADWPPGGQGTLVTVS

SEQ ID NO: 4234 - protein, 111 aa, synthetic construct
EVQLVESGGGSVQAGGSLRLSCTASGFTFDVSDMGWYRQAPGNECELVSTVSSDGRTLYADSVKGRFTISQDNAKNTIYLQMNSLKPEDTAMYYCAADWPPGGQGTLVTVS

SEQ ID NO: 4235 - protein, 111 aa, synthetic construct
EVQLVESGGGSVQAGGSLRLSCTASGFTFDVSDMGWYRQAPGNECELVSTVSSDGRTLYADSVKGRFTISQDNAKNTIYLQMNSLKPEDTAVYYCAADWPPGGQGTLVTVS

SEQ ID NO: 4236 - protein, 111 aa, synthetic construct
EVQLVESGGGSVQAGGSLRLSCTASGFTFDVSDMGWYRQAPGNECELVSTVSSDGRTLYADSVKGRFTISQDNAKNTVYLQMNSLKPEDTAMYYCAADWPPGGQGTLVTVS

SEQ ID NO: 4237 - protein, 111 aa, synthetic construct
EVQLVESGGGSVQAGGSLRLSCTASGFTFDVSDMGWYRQAPGNECELVSTVSSDGRTLYADSVKGRFTISQDNAKNTVYLQMNSLKPEDTAVYYCAADWPPGGQGTLVTVS

SEQ ID NO: 4238 - protein, 111 aa, synthetic construct
EVQLVESGGGSVQAGGSLRLSCTASGFTFDVSDMGWYRQAPGNERELVATIRSDGRTLYADSVKGRFTISQDNAKNTVYLQMNSLKPEDTAVYYCAADWPPGGQGTLVTVS

SEQ ID NO: 4239 - protein, 111 aa, synthetic construct
EVQLVESGGGSVQAGGSLRLSCTASGFTFDVSDMGWYRQAPGNERELVSTISSDGRTLYADSVKGRFTISQDNAKNTIYLQMNSLKPEDTAVYYCAADWPPGGQGTLVTVS

SEQ ID NO: 4240 - protein, 111 aa, synthetic construct
EVQLVESGGGSVQAGGSLRLSCTASGFTFDVSDMGWYRQAPGNERELVSTISSDGRTLYADSVKGRFTISQDNAKNTVYLQMNSLKPEDTAVYYCAADWPPGGQGTLVTVS

SEQ ID NO: 4241 - protein, 111 aa, synthetic construct
EVQLVESGGGSVQAGGSLRLSCTASGFTFDVSDMGWYRQAPGNERELVSTVSGDGRTLYADSVKGRFTISQDNAKNTVYLQMNSLKPEDTAVYYCAADWPPGGQGTLVTVS

SEQ ID NO: 4242 - protein, 111 aa, synthetic construct
EVQLVESGGGSVQAGGSLRLSCTASGFTFDVSDMGWYRQAPGNERELVSTVSSDGRTLYADSVKGRFTISQDNAKNTIYLQMNSLKPEDTAMYYCAADWPPGGQGTLVTVS

SEQ ID NO: 4243 - protein, 111 aa, synthetic construct
EVQLVESGGGSVQAGGSLRLSCTASGFTFDVSDMGWYRQAPGNERELVSTVSSDGRTLYADSVKGRFTISQDNAKNTIYLQMNSLKPEDTAVYYCAADWPPGGQGTLVTVS

SEQ ID NO: 4244 - protein, 111 aa, synthetic construct
EVQLVESGGGSVQAGGSLRLSCTASGFTFDVSDMGWYRQAPGNERELVSTVSSDGRTLYADSVKGRFTISQDNAKNTVYLQMNSLKPEDTAVYYCAADWPPGGQGTLVTVS

SEQ ID NO: 4245 - protein, 111 aa, synthetic construct
EVQLVESGGGSVQAGGSLRLSCTASGFTFDVSDMGWYRQARGNERELVSTVSSDGRTLYADSVKGRFTISQDNAKNTIYLQMNSLKPEDTAVYYCAADWPPGGQGTLVTVS

SEQ ID NO: 4246 - protein, 111 aa, synthetic construct
EVQLVESGGGSVQAGGSLRLSRTASGFTFDDSDMGWYRQAPGNECELVSTVSSDGRTLYADSVKGRFSISQDNAKNTVYLQMNSLKPEDTAVYYCAADWPPGGQGTLVTVS

SEQ ID NO: 4247 - protein, 111 aa, synthetic construct
EVQLVESGGGSVQAGGSLRLSRTASGFTFDDSDMGWYRQAPGNECELVSTVSSDGRTLYADSVKGRFTISQDNAKNTIYLQMNSLKPEDTAMYYCAADWPPGGQGTLVTVS

SEQ ID NO: 4248 - protein, 111 aa, synthetic construct
EVQLVESGGGSVQAGGSLRLSRTASGFTFDDSDMGWYRQAPGNECELVSTVSSDGRTLYADSVKGRFTISQDNAKNTIYLQMNSLKPEDTAVYYCAADWPPGGQGTLVTVS

SEQ ID NO: 4249 - protein, 111 aa, synthetic construct
EVQLVESGGGSVQAGGSLRLSRTASGFTFDDSDMGWYRQAPGNECELVSTVSSDGRTLYADSVKGRFTISQDNAKNTVYLQMNSLKPEDTAMYYCAADWPPGGQGTLVTVS

SEQ ID NO: 4250 - protein, 111 aa, synthetic construct
EVQLVESGGGSVQAGGSLRLSRTASGFTFDDSDMGWYRQAPGNECELVSTVSSDGRTLYADSVKGRFTISQDNAKNTVYLQMNSLKPEDTAVYYCAADWPPGGQGTLVTVS

SEQ ID NO: 4251 - protein, 111 aa, synthetic construct
EVQLVESGGGSVQAGGSLRLSRTASGFTFDDSDMGWYRQAPGNERELVATIRSDGRTLYADSVKGRFTISQDNAKNTIYLQMNSLKPEDTAVYYCAADWPPGGQGTLVTVS

SEQ ID NO: 4252 - protein, 111 aa, synthetic construct
EVQLVESGGGSVQAGGSLRLSRTASGFTFDDSDMGWYRQAPGNERELVATIRSDGRTLYADSVKGRFTISQDNAKNTVYLQMNSLKPEDTAVYYCAADWPPGGQGTLVTVS

SEQ ID NO: 4253 - protein, 111 aa, synthetic construct
EVQLVESGGGSVQAGGSLRLSRTASGFTFDDSDMGWYRQAPGNERELVSTISSDGRTLYADSVKGRFTISQDNAKNTIYLQMNSLKPEDTAVYYCAADWPPGGQGTLVTVS

SEQ ID NO: 4254 - protein, 111 aa, synthetic construct
EVQLVESGGGSVQAGGSLRLSRTASGFTFDDSDMGWYRQAPGNERELVSTISSDGRTLYADSVKGRFTISQDNAKNTVYLQMNSLKPEDTAVYYCAADWPPGGQGTLVTVS

SEQ ID NO: 4255 - protein, 111 aa, synthetic construct
EVQLVESGGGSVQAGGSLRLSRTASGFTFDDSDMGWYRQAPGNERELVSTVSSDGRTLYADSVKGRFSISQDNAKNTVYLQMNSLKPEDTAVYYCAADWPPGGQGTLVTVS

SEQ ID NO: 4256 - protein, 111 aa, synthetic construct
EVQLVESGGGSVQAGGSLRLSRTASGFTFDDSDMGWYRQAPGNERELVSTVSSDGRTLYADSVKGRFTISQDNAKNTIYLQMNSLKPEDTAMYYCAADWPPGGQGTLVTVS

SEQ ID NO: 4257 - protein, 111 aa, synthetic construct
EVQLVESGGGSVQAGGSLRLSRTASGFTFDDSDMGWYRQAPGNERELVSTVSSDGRTLYADSVKGRFTISQDNAKNTIYLQMNSLKPEDTAVYYCAADWPPGGQGTLVTVS

SEQ ID NO: 4258 - protein, 111 aa, synthetic construct
EVQLVESGGGSVQAGGSLRLSRTASGFTFDDSDMGWYRQAPGNERELVSTVSSDGRTLYADSVKGRFTISQDNAKNTVYLQMNSLKPEDTAVYYCAADWPPGGQGTLVTVS

SEQ ID NO: 4259 - protein, 111 aa, synthetic construct
EVQLVESGGGSVQAGGSLRLSRTASGFTFDDSDMGWYRQARGNERELVSTVSSDGRTLYADSVKGRFTISQDNAKNTVYLQMNSLKPEDTAVYYCAADWPPGGQGTLVTVS

SEQ ID NO: 4260 - protein, 111 aa, synthetic construct
EVQLVESGGGSVQAGGSLRLSRTASGFTFDVSDMGWYRQAPGNECELVSTVSSDGRTLYADSVKGRFTISQDNAKNTIYLQMNSLKPEDTAVYYCAADWPPGGQGTLVTVS

SEQ ID NO: 4261 - protein, 111 aa, synthetic construct
EVQLVESGGGSVQAGGSLRLSRTASGFTFDVSDMGWYRQAPGNECELVSTVSSDGRTLYADSVKGRFTISQDNAKNTVYLQMNSLKPEDTAVYYCAADWPPGGQGTLVTVS

SEQ ID NO: 4262 - protein, 111 aa, synthetic construct
EVQLVESGGGSVQAGGSLRLSRTASGFTFDVSDMGWYRQAPGNERELVSTVSSDGRTLYADSVKGRFTISQDNAKNTVYLQMNSLKPEDTAVYYCAADWPPGGQGTLVTVS

SEQ ID NO: 4263 - protein, 111 aa, synthetic construct
EVQVVESGGGSVEAGGSLRLSCTASGFTFDDSDMGWYRQAPGNECELVSTVSSDGRTLYADSVKGRFTISQDNAKNTIYLQMNSLKPEDTAVYYCAADWPPGGQGTLVTVS

SEQ ID NO: 4264 - protein, 111 aa, synthetic construct
EVQVVESGGGSVEAGGSLRLSCTASGFTFDDSDMGWYRQAPGNECELVSTVSSDGRTLYADSVKGRFTISQDNAKNTVYLQMNSLKPEDTAVYYCAADWPPGGQGTLVTVS

SEQ ID NO: 4265 - protein, 111 aa, synthetic construct
EVQVVESGGGSVEAGGSLRLSCTASGFTFDDSDMGWYRQAPGNERELVATIRSDGRTLYADSVKGRFTISQDNAKNTVYLQMNSLKPEDTAVYYCAADWPPGGQGTLVTVS

SEQ ID NO: 4266 - protein, 111 aa, synthetic construct
EVQVVESGGGSVEAGGSLRLSCTASGFTFDDSDMGWYRQAPGNERELVSTISSDGRTLYADSVKGRFTISQDNAKNTVYLQMNSLKPEDTAVYYCAADWPPGGQGTLVTVS

SEQ ID NO: 4267 - protein, 111 aa, synthetic construct
EVQVVESGGGSVEAGGSLRLSCTASGFTFDDSDMGWYRQAPGNERELVSTVSSDGRTLYADSVKGRFTISQDNAKNTVYLQMNSLKPEDTAVYYCAADWPPGGQGTLVTVS

SEQ ID NO: 4268 - protein, 111 aa, synthetic construct
EVQVVESGGGSVEAGGSLRLSCTASGFTFDDSDMGWYRQARGNERELVSTVSSDGRTLYADSVKGRFTISQDNAKNTVYLQMNSLKPEDTAVYYCAADWPPGGQGTLVTVS

SEQ ID NO: 4269 - protein, 111 aa, synthetic construct
EVQVVESGGGSVEAGGSLRLSCTASGFTFDVSDMGWYRQAPGNECELVSTVSSDGRTLYADSVKGRFTISQDNAKNTVYLQMNSLKPEDTAVYYCAADWPPGGQGTLVTVS

SEQ ID NO: 4270 - protein, 111 aa, synthetic construct
EVQVVESGGGSVQAGGSLRLSCTASGFTFDDSDMGWYRQAPGNECELVSTVSSDGRTLYADSVKGRFSISQDNAKNTVYLQMNSLKPEDTAVYYCAADWPPGGQGTLVTVS

SEQ ID NO: 4271 - protein, 111 aa, synthetic construct
EVQVVESGGGSVQAGGSLRLSCTASGFTFDDSDMGWYRQAPGNECELVSTVSSDGRTLYADSVKGRFTISQDNAKNTIYLQMNSLKPEDTAMYYCAADWPPGGQGTLVTVS

SEQ ID NO: 4272 - protein, 111 aa, synthetic construct
EVQVVESGGGSVQAGGSLRLSCTASGFTFDDSDMGWYRQAPGNECELVSTVSSDGRTLYADSVKGRFTISQDNAKNTIYLQMNSLKPEDTAVYYCAADWPPGGQGTLVTVS

SEQ ID NO: 4273 - protein, 111 aa, synthetic construct
EVQVVESGGGSVQAGGSLRLSCTASGFTFDDSDMGWYRQAPGNECELVSTVSSDGRTLYADSVKGRFTISQDNAKNTVYLQMNSLKPEDTAVYYCAADWPPGGQGTLVTVS

SEQ ID NO: 4274 - protein, 111 aa, synthetic construct
EVQVVESGGGSVQAGGSLRLSCTASGFTFDDSDMGWYRQAPGNERELVATIRSDGRTLYADSVKGRFTISQDNAKNTVYLQMNSLKPEDTAVYYCAADWPPGGQGTLVTVS

SEQ ID NO: 4275 - protein, 111 aa, synthetic construct
EVQVVESGGGSVQAGGSLRLSCTASGFTFDDSDMGWYRQAPGNERELVSTIRSDGRTLYADSVKGRFTISQDNAKNTIYLQMNSLKPEDTAVYYCAADWPPGGQGTLVTVS

SEQ ID NO: 4276 - protein, 111 aa, synthetic construct
EVQVVESGGGSVQAGGSLRLSCTASGFTFDDSDMGWYRQAPGNERELVSTVSSDGRTLYADSVKGRFSISQDNAKNTVYLQMNSLKPEDTAVYYCAADWPPGGQGTLVTVS

SEQ ID NO: 4277 - protein, 111 aa, synthetic construct
EVQVVESGGGSVQAGGSLRLSCTASGFTFDDSDMGWYRQAPGNERELVSTVSSDGRTLYADSVKGRFTISQDNAKNTIYLQMNSLKPEDTAVYYCAADWPPGGQGTLVTVS

SEQ ID NO: 4278 - protein, 111 aa, synthetic construct
EVQVVESGGGSVQAGGSLRLSCTASGFTFDDSDMGWYRQAPGNERELVSTVSSDGRTLYADSVKGRFTISQDNAKNTVYLQMNSLKPEDTAVYYCAADWPPGGQGTLVTVS

SEQ ID NO: 4279 - protein, 111 aa, synthetic construct
EVQVVESGGGSVQAGGSLRLSCTASGFTFDDSDMGWYRQARGNERELVSTVSSDGRTLYADSVKGRFTISQDNAKNTIYLQMNSLKPEDTAVYYCAADWPPGGQGTLVTVS

SEQ ID NO: 4280 - protein, 111 aa, synthetic construct
EVQVVESGGGSVQAGGSLRLSCTASGFTFDDSDMGWYRQARGNERELVSTVSSDGRTLYADSVKGRFTISQDNAKNTVYLQMNSLKPEDTAVYYCAADWPPGGQGTLVTVS

SEQ ID NO: 4281 - protein, 111 aa, synthetic construct
EVQVVESGGGSVQAGGSLRLSCTASGFTFDVSDMGWYRQAPGNECELVSTVSSDGRTLYADSVKGRFSISQDNAKNTVYLQMNSLKPEDTAVYYCAADWPPGGQGTLVTVS

SEQ ID NO: 4282 - protein, 111 aa, synthetic construct
EVQVVESGGGSVQAGGSLRLSCTASGFTFDVSDMGWYRQAPGNECELVSTVSSDGRTLYADSVKGRFTISQDNAKNTIYLQMNSLKPEDTAMYYCAADWPPGGQGTLVTVS

SEQ ID NO: 4283 - protein, 111 aa, synthetic construct
EVQVVESGGGSVQAGGSLRLSCTASGFTFDVSDMGWYRQAPGNECELVSTVSSDGRTLYADSVKGRFTISQDNAKNTIYLQMNSLKPEDTAVYYCAADWPPGGQGTLVTVS

SEQ ID NO: 4284 - protein, 111 aa, synthetic construct
EVQVVESGGGSVQAGGSLRLSCTASGFTFDVSDMGWYRQAPGNECELVSTVSSDGRTLYADSVKGRFTISQDNAKNTVYLQMNSLKPEDTAMYYCAADWPPGGQGTLVTVS

SEQ ID NO: 4285 - protein, 111 aa, synthetic construct
EVQVVESGGGSVQAGGSLRLSCTASGFTFDVSDMGWYRQAPGNECELVSTVSSDGRTLYADSVKGRFTISQDNAKNTVYLQMNSLKPEDTAVYYCAADWPPGGQGTLVTVS

SEQ ID NO: 4286 - protein, 111 aa, synthetic construct
EVQVVESGGGSVQAGGSLRLSCTASGFTFDVSDMGWYRQAPGNERELVSTISSDGRTLYADSVKGRFTISQDNAKNTIYLQMNSLKPEDTAVYYCAADWPPGGQGTLVTVS

SEQ ID NO: 4287 - protein, 111 aa, synthetic construct
EVQVVESGGGSVQAGGSLRLSCTASGFTFDVSDMGWYRQAPGNERELVSTISSDGRTLYADSVKGRFTISQDNAKNTVYLQMNSLKPEDTAVYYCAADWPPGGQGTLVTVS

SEQ ID NO: 4288 - protein, 111 aa, synthetic construct
EVQVVESGGGSVQAGGSLRLSCTASGFTFDVSDMGWYRQAPGNERELVSTVSSDGRTLYADSVKGRFSISQDNAKNTVYLQMNSLKPEDTAVYYCAADWPPGGQGTLVTVS

SEQ ID NO: 4289 - protein, 111 aa, synthetic construct
EVQVVESGGGSVQAGGSLRLSCTASGFTFDVSDMGWYRQAPGNERELVSTVSSDGRTLYADSVKGRFTISQDNAKNTIYLQMNSLKPEDTAVYYCAADWPPGGQGTLVTVS

SEQ ID NO: 4290 - protein, 111 aa, synthetic construct
EVQVVESGGGSVQAGGSLRLSCTASGFTFDVSDMGWYRQAPGNERELVSTVSSDGRTLYADSVKGRFTISQDNAKNTVYLQMNSLKPEDTAMYYCAADWPPGGQGTLVTVS

SEQ ID NO: 4291 - protein, 111 aa, synthetic construct
EVQVVESGGGSVQAGGSLRLSCTASGFTFDVSDMGWYRQAPGNERELVSTVSSDGRTLYADSVKGRFTISQDNAKNTVYLQMNSLKPEDTAVYYCAADWPPGGQGTLVTVS

SEQ ID NO: 4292 - protein, 111 aa, synthetic construct
EVQVVESGGGSVQAGGSLRLSCTASGFTFDVSDMGWYRQARGNERELVSTVSSDGRTLYADSVKGRFTISQDNAKNTVYLQMNSLKPEDTAVYYCAADWPPGGQGTLVTVS

SEQ ID NO: 4293 - protein, 111 aa, synthetic construct
EVQVVESGGGSVQAGGSLRLSRTASGFTFDDSDMGWYRQAPGNECELVSTVSSDGRTLYADSVKGRFSISQDNAKNTVYLQMNSLKPEDTAVYYCAADWPPGGQGTLVTVS

SEQ ID NO: 4294 - protein, 111 aa, synthetic construct
EVQVVESGGGSVQAGGSLRLSRTASGFTFDDSDMGWYRQAPGNECELVSTVSSDGRTLYADSVKGRFTISQDNAKNTIYLQMNSLKPEDTAMYYCAADWPPGGQGTLVTVS

SEQ ID NO: 4295 - protein, 111 aa, synthetic construct
EVQVVESGGGSVQAGGSLRLSRTASGFTFDDSDMGWYRQAPGNECELVSTVSSDGRTLYADSVKGRFTISQDNAKNTIYLQMNSLKPEDTAVYYCAADWPPGGQGTLVTVS

SEQ ID NO: 4296 - protein, 111 aa, synthetic construct
EVQVVESGGGSVQAGGSLRLSRTASGFTFDDSDMGWYRQAPGNECELVSTVSSDGRTLYADSVKGRFTISQDNAKNTVYLQMNSLKPEDTAVYYCAADWPPGGQGTLVTVS

SEQ ID NO: 4297 - protein, 111 aa, synthetic construct
EVQVVESGGGSVQAGGSLRLSRTASGFTFDDSDMGWYRQAPGNERELVSTIRSDGRTLYADSVKGRFTISQDNAKNTVYLQMNSLKPEDTAVYYCAADWPPGGQGTLVTVS

SEQ ID NO: 4298 - protein, 111 aa, synthetic construct
EVQVVESGGGSVQAGGSLRLSRTASGFTFDDSDMGWYRQAPGNERELVSTVSSDGRTLYADSVKGRFTISQDNAKNTIYLQMNSLKPEDTAVYYCAADWPPGGQGTLVTVS

SEQ ID NO: 4299 - protein, 111 aa, synthetic construct
EVQVVESGGGSVQAGGSLRLSRTASGFTFDDSDMGWYRQAPGNERELVSTVSSDGRTLYADSVKGRFTISQDNAKNTVYLQMNSLKPEDTAVYYCAADWPPGGQGTLVTVS

SEQ ID NO: 4300 - protein, 111 aa, synthetic construct
EVQVVESGGGSVQAGGSLRLSRTASGFTFDDSDMGWYRQARGNERELVSTVSSDGRTLYADSVKGRFTISQDNAKNTVYLQMNSLKPEDTAVYYCAADWPPGGQGTLVTVS

SEQ ID NO: 4301 - protein, 111 aa, synthetic construct
EVQVVESGGGSVQAGGSLRLSRTASGFTFDVSDMGWYRQAPGNECELVSTVSSDGRTLYADSVKGRFTISQDNAKNTIYLQMNSLKPEDTAVYYCAADWPPGGQGTLVTVS

SEQ ID NO: 4302 - protein, 111 aa, synthetic construct
EVQVVESGGGSVQAGGSLRLSRTASGFTFDVSDMGWYRQAPGNECELVSTVSSDGRTLYADSVKGRFTISQDNAKNTVYLQMNSLKPEDTAVYYCAADWPPGGQGTLVTVS

SEQ ID NO: 4303 - protein, 116 aa, synthetic construct
DVQLVESGGGLVQAGESLRLSCTAPGFTSNSCGMDWYRQAPGKEREFVASINTDGTTSYADSVKGRFTVSKDKAKDTVYLQMNSLKPEDTAMYSCIYCRYDGEFAYWGQGTLVTVS

SEQ ID NO: 4304 - protein, 116 aa, synthetic construct
DVQLVESGGGSVQAGESLRLSCTAPGFTSNSCGMDWYRQAPGKEREFVASINTDGTTSYADSVKGRFTVSKDKAKDTVYLQMNSLKPEDTAMYSCIYCRYDGEFAYWGQGTLVTVS

SEQ ID NO: 4305 - protein, 110 aa, synthetic construct
ESGGGSVQAGESLRLSCTAPGFTSNSCGMDWYRQAPGKEREFVASINTDGTTSYADSVKGRFTISRDNAKNTVYLQMNSLKPEDTAVYYCNGGWSLAMDYWGQGTSVTVS

SEQ ID NO: 4306 - protein, 115 aa, synthetic construct
ESGGGSVQAGESLRLSCTAPGFTSNSCGMDWYRQAPGKEREFVASINTDGTTSYADSVKGRFTVSKDKAKDTLYLQMNSLKPEDTAVYFCAASPRQLGPYYAMDYWGQGTSVTVS

SEQ ID NO: 4307 - protein, 115 aa, synthetic construct
ESGGGSVQAGESLRLSCTAPGFTSNSCGMDWYRQAPGKEREFVASINTDGTTSYADSVKGRFTVSKDKAKDTVYLQMNSLKPEDTAVYFCAASPRQLGPYYAMDYWGQGTSVTVS

SEQ ID NO: 4308 - protein, 111 aa, synthetic construct
ESGGGSVQAGESLRLSCTAPGFTSNSCGMDWYRQAPGKEREFVASINTDGTTSYADSVKGRFTVSKDKAKDTVYLQMNSLKPEDTAVYYCAAEDFGNSKTYWGQGTLVTVS

SEQ ID NO: 4309 - protein, 111 aa, synthetic construct
ESGGGSVQAGESLRLSCTAPGFTSNSCGMDWYRQAPGKEREFVASINTDGTTSYADSVKGRFTVSKDKAKDTVYLQMNSLKSEDTAVYYCAAEDFGNSKTYWGQGTLVTVS

SEQ ID NO: 4310 - protein, 110 aa, synthetic construct
ESGGGSVQAGESLRLSCTAPGFTSNSCGMDWYRQAPGKEREFVASINTDGTTSYADSVKGRFTVSKDKAKNTVYLQMNSLKPEDTAVYYCNGGWSLAMDYWGQGTSVTVS

SEQ ID NO: 4311 - protein, 110 aa, synthetic construct
ESGGGSVQAGESLRLSCTAPGFTSNSCGMDWYRQAPGKEREFVASINTDGTTSYADSVKGRFTVSKDNAKNTVYLQMNSLKPEDTAVYYCNGGWSLAMDYWGQGTSVTVS

SEQ ID NO: 4312 - protein, 116 aa, synthetic construct
EVKLEESGGGSVQAGESLRLSCTAPGFTSNSCGMDWYRQAPGKEREFVASINTDGTTSYADSVKGRFTVSKDKAKDTVYLQMNSLKPEDTAMYSCIYCRYDGEFAYWGQGTLVTVS

SEQ ID NO: 4313 - protein, 116 aa, synthetic construct
EVQLVESGGGSVQAGESLRLSCTAPGFTSNSCGMDWYRQAPGKEREFVASINTDGTTSYADSVKGRFTVSKDKAKDTVYLQMNSLKPEDTAMYSCIYCRYDGEFAYWGQGTLVTVS

SEQ ID NO: 4314 - protein, 116 aa, synthetic construct
EVQLVESGGGSVQAGETLRLSCTAPGFTSNSCGMDWYRQAPGKEREFVASINTDGTTSYADSVKGRFTVSKDKAKDTVYLQMNSLKPEDTAMYSCIYCRYDGEFAYWGQGTLVTVS

SEQ ID NO: 4315 - protein, 116 aa, synthetic construct
EVQLVESGGGSVQAGETLRLSCTASGFTFDDSDMGWYRQAPGKEREFVASINTDGTTSYADSVKGRFTVSKDKAKDTVYLQMNSLKPEDTAMYSCIYCRYDGEFAYWGQGTLVTVS

SEQ ID NO: 4316 - protein, 116 aa, synthetic construct
EVQLVESGGGSVQAGETLRLSCTASGFTSNSCGMDWYRQAPGKEREFVASINTDGTTSYADSVKGRFTVSKDKAKDTVYLQMNSLKPEDTAMYSCIYCRYDGEFAYWGQGTLVTVS

SEQ ID NO: 4317 - protein, 114 aa, synthetic construct
KLEESGGGSVQAGESLRLSCTAPGFTSNSCGMDWYRQAPGKEREFVASINTDGTTSYADSVKGRFTVSKDKAKDTVYLQMNSLKPEDTAMYSCIYCRYDGEFAYWGQGTLVTVS

SEQ ID NO: 4318 - protein, 115 aa, synthetic construct
VKLEESGGGSVQACESLRLSCTAPGFTSNSCGMDWYRQAPGKEREFVASINTDGTTSYADSVKGRFTVSKDKAKDTVYLQMNSLKPEDTAMYSCIYCRYDGEFAYWGQGTLVTVS

SEQ ID NO: 4319 - protein, 115 aa, synthetic construct
VKLEESGGGSVQAGESLRLSCTAPGFTSNSCGIDWYRQAPGKEREFVASINTDGTTSYADSVKGRFTVSKDKAKDTVYLQMNSLKPEDTAMYSCIYCRYDGEFAYWGQGTLVTVS

SEQ ID NO: 4320 - protein, 115 aa, synthetic construct
VKLEESGGGSVQAGESLRLSCTAPGFTSNSCGMAWYRQAPGKEREFVASINTDGTTSYADSVKGRFTVSKDKAKDTVYLQMNSLKPEDTAMYSCIYCRYDGEFAYWGQGTLVTVS

SEQ ID NO: 4321 - protein, 115 aa, synthetic construct
VKLEESGGGSVQAGESLRLSCTAPGFTSNSCGMDWDRQAPGKEREFVASINTDGTTSYADSVKGRFTVSKDKAKDTVYLQMNSLKPEDTAMYSCIYCRYDGEFAYWGQGTLVTVS

SEQ ID NO: 4322 - protein, 115 aa, synthetic construct
VKLEESGGGSVQAGESLRLSCTAPGFTSNSCGMDWYIQAPGKEREFVASINTDGTTSYADSVKGRFTVSKDKAKDTVYLQMNSLKPEDTAMYSCIYCRYDGEFAYWGQGTLVTVS

SEQ ID NO: 4323 - protein, 115 aa, synthetic construct
VKLEESGGGSVQAGESLRLSCTAPGFTSNSCGMDWYRQAPGKEREFVASINTDGTTSYADSVKGRCTVSKDKAKDTVDLQMNSLKPEDTAMYSCIYCRYDGEFAYWGQGTLVTVS

SEQ ID NO: 4324 - protein, 115 aa, synthetic construct
VKLEESGGGSVQAGESLRLSCTAPGFTSNSCGMDWYRQAPGKEREFVASINTDGTTSYADSVKGRCTVSKDKAKDTVYLQMNSLKPEDTAMYSCIYCRYDGEFAYWGQGTLVTVS

SEQ ID NO: 4325 - protein, 115 aa, synthetic construct
VKLEESGGGSVQAGESLRLSCTAPGFTSNSCGMDWYRQAPGKEREFVASINTDGTTSYADSVKGRFNVSKDKAKDTVYLQMNSLKPEDTAMYSCIYCRYDGEFAYWGQGTLVTVS

SEQ ID NO: 4326 - protein, 115 aa, synthetic construct
VKLEESGGGSVQAGESLRLSCTAPGFTSNSCGMDWYRQAPGKEREFVASINTDGTTSYADSVKGRFTVSKDKAKATVYLQMNSLKPEDTAMYSCIYCRYDGEFAYWGQGTLVTVS

SEQ ID NO: 4327 - protein, 115 aa, synthetic construct
VKLEESGGGSVQAGESLRLSCTAPGFTSNSCGMDWYRQAPGKEREFVASINTDGTTSYADSVKGRFTVSKDKAKDTVDLQMNSLKPEDTAMYSCIYCRYDGEFAYWGQGTLVTVS

SEQ ID NO: 4328 - protein, 115 aa, synthetic construct
VKLEESGGGSVQAGESLRLSCTAPGFTSNSCGMDWYRQAPGKEREFVASINTDGTTSYADSVKGRFTVSKDKAKDTVDLQMNSLKPEDTAMYSCTYCRYDGEFAYWGQGTLVTVS

SEQ ID NO: 4329 - protein, 115 aa, synthetic construct
VKLEESGGGSVQAGESLRLSCTAPGFTSNSCGMDWYRQAPGKEREFVASINTDGTTSYADSVKGRFTVSKDKAKDTVDLQMNSLKPEDTARYSCIYCRYDGEFAYWGQGTLVTVS

SEQ ID NO: 4330 - protein, 115 aa, synthetic construct
VKLEESGGGSVQAGESLRLSCTAPGFTSNSCGMDWYRQAPGKEREFVASINTDGTTSYADSVKGRFTVSKDKAKDTVHLQMNSLKPEDTAMYSCIYCRYDGEFAYWGQGTLVTVS

SEQ ID NO: 4331 - protein, 115 aa, synthetic construct
VKLEESGGGSVQAGESLRLSCTAPGFTSNSCGMDWYRQAPGKEREFVASINTDGTTSYADSVKGRFTVSKDKAKDTVYHQMNSLKPEDTAMYSCIYCRYDGEFAYWGQGTLVTVS

SEQ ID NO: 4332 - protein, 115 aa, synthetic construct
VKLEESGGGSVQAGESLRLSCTAPGFTSNSCGMDWYRQAPGKEREFVASINTDGTTSYADSVKGRFTVSKDKAKDTVYLPMNSLKPEDTAMYSCIYCRYDGEFAYWGQGTLVTVS

SEQ ID NO: 4333 - protein, 115 aa, synthetic construct
VKLEESGGGSVQAGESLRLSCTAPGFTSNSCGMDWYRQAPGKEREFVASINTDGTTSYADSVKGRFTVSKDKAKDTVYLQMNSLKPEATAMYSCIYCRYDGEFAYWGQGTLVTVS

SEQ ID NO: 4334 - protein, 115 aa, synthetic construct
VKLEESGGGSVQAGESLRLSCTAPGFTSNSCGMDWYRQAPGKEREFVASINTDGTTSYADSVKGRFTVSKDKAKDTVYLQMNSLKPEDPAMYSCIYCRYDGEFAYWGQGTLVTVS

SEQ ID NO: 4335 - protein, 113 aa, synthetic construct
VKLEESGGGSVQAGESLRLSCTAPGFTSNSCGMDWYRQAPGKEREFVASINTDGTTSYADSVKGRFTVSKDKAKDTVYLQMNSLKPEDTAIYSCRTMASRIGCWGQGTLVTVS

SEQ ID NO: 4336 - protein, 115 aa, synthetic construct
VKLEESGGGSVQAGESLRLSCTAPGFTSNSCGMDWYRQAPGKEREFVASINTDGTTSYADSVKGRFTVSKDKAKDTVYLQMNSLKPEDTAMYPCIYCRYDGEFAYWGQGTLVTVS

SEQ ID NO: 4337 - protein, 115 aa, synthetic construct
VKLEESGGGSVQAGESLRLSCTAPGFTSNSCGMDWYRQAPGKEREFVASINTDGTTSYADSVKGRFTVSKDKAKDTVYLQMNSLKPEDTAMYSCIYCRFDGEFAYWGQGTLVTVS

SEQ ID NO: 4338 - protein, 115 aa, synthetic construct
VKLEESGGGSVQAGESLRLSCTAPGFTSNSCGMDWYRQAPGKEREFVASINTDGTTSYADSVKGRFTVSKDKAKDTVYLQMNSLKPEDTAMYSCIYCRHDGEFAYWGQGTLVTVS

SEQ ID NO: 4339 - protein, 115 aa, synthetic construct
VKLEESGGGSVQAGESLRLSCTAPGFTSNSCGMDWYRQAPGKEREFVASINTDGTTSYADSVKGRFTVSKDKAKDTVYLQMNSLKPEDTAMYSCIYCRYDGEFAYWGPGTLVTVS

SEQ ID NO: 4340 - protein, 115 aa, synthetic construct
VKLEESGGGSVQAGESLRLSCTAPGFTSNSCGMDWYRQAPGKEREFVASINTDGTTSYADSVKGRFTVSKDKAKDTVYLQMNSLKPEDTAMYSCIYCRYDGEFAYWGQGTLVAVS

SEQ ID NO: 4341 - protein, 115 aa, synthetic construct
VKLEESGGGSVQAGESLRLSCTAPGFTSNSCGMDWYRQAPGKEREFVASINTDGTTSYADSVKGRFTVSKDKAKDTVYLQMNSLKPEDTAMYSCIYCRYDGEFAYWGQGTLVTAL

SEQ ID NO: 4342 - protein, 115 aa, synthetic construct
VKLEESGGGSVQAGESLRLSCTAPGFTSNSCGMDWYRQAPGKEREFVASINTDGTTSYADSVKGRFTVSKDKAKDTVYLQMNSLKPEDTAMYSCIYCRYDGEFAYWGQGTLVTIS

SEQ ID NO: 4343 - protein, 115 aa, synthetic construct
VKLEESGGGSVQAGESLRLSCTAPGFTSNSCGMDWYRQAPGKEREFVASINTDGTTSYADSVKGRFTVSKDKAKDTVYLQMNSLKPEDTAMYSCIYCRYDGEFAYWGQGTLVTVA

SEQ ID NO: 4344 - protein, 115 aa, synthetic construct
VKLEESGGGSVQAGESLRLSCTAPGFTSNSCGMDWYRQAPGKEREFVASINTDGTTSYADSVKGRFTVSKDKAKDTVYLQMNSLKPEDTAMYSCIYCRYDGEFAYWGQGTLVTVS

SEQ ID NO: 4345 - protein, 115 aa, synthetic construct
VKLEESGGGSVQAGESLRLSCTAPGFTSNSCGMDWYRQAPGKEREFVASINTDGTTSYADSVKGRFTVSKDKAKDTVYLQMNSLKPEDTAMYSCIYCRYDGEFAYWGQGTSVTVS

SEQ ID NO: 4346 - protein, 115 aa, synthetic construct
VKLEESGGGSVQAGESLRLSCTAPGFTSNSCGMDWYRQAPGKEREFVASINTDGTTSYADSVKGRFTVSKDKAKDTVYLQMNSLKPEDTAMYSCIYCRYDGEFAYWGQVTLVTVS

SEQ ID NO: 4347 - protein, 115 aa, synthetic construct
VKLEESGGGSVQAGESLRLSCTAPGFTSNSCGMDWYRQAPGKEREFVASINTDGTTSYADSVKGRFTVSKDKAKDTVYLQMNSLKPEDTAMYSCIYCRYDGELAYWGQGTLVTVS

SEQ ID NO: 4348 - protein, 115 aa, synthetic construct
VKLEESGGGSVQAGESLRLSCTAPGFTSNSCGMDWYRQAPGKEREFVASINTDGTTSYADSVKGRFTVSKDKAKDTVYLQMNSLKPEDTAMYSCIYFRYDGEFAYWGQGTLVTVS

SEQ ID NO: 4349 - protein, 115 aa, synthetic construct
VKLEESGGGSVQAGESLRLSCTAPGFTSNSCGMDWYRQAPGKEREFVASINTDGTTSYADSVKGRFTVSKDKAKDTVYLQMNSLKPEDTAMYSCIYWRYDGEFAYWGQGTLVTVS

SEQ ID NO: 4350 - protein, 115 aa, synthetic construct
VKLEESGGGSVQAGESLRLSCTAPGFTSNSCGMDWYRQAPGKEREFVASINTDGTTSYADSVKGRFTVSKDKAKDTVYLQMNSLKPEDTAMYSCSYCRYDGEFAYWGQGTLVTVS

SEQ ID NO: 4351 - protein, 115 aa, synthetic construct
VKLEESGGGSVQAGESLRLSCTAPGFTSNSCGMDWYRQAPGKEREFVASINTDGTTSYADSVKGRFTVSKDKAKDTVYLQMNSLKPEDTAMYSCTYCRYDGEFAYWGQGTLVTVS

SEQ ID NO: 4352 - protein, 115 aa, synthetic construct
VKLEESGGGSVQAGESLRLSCTAPGFTSNSCGMDWYRQAPGKEREFVASINTDGTTSYADSVKGRFTVSKDKAKDTVYLQMNSLKPEDTAMYSCVYCRYDGEFAYWGQGTLVTVS

SEQ ID NO: 4353 - protein, 115 aa, synthetic construct
VKLEESGGGSVQAGESLRLSCTAPGFTSNSCGMDWYRQAPGKEREFVASINTDGTTSYADSVKGRFTVSKDKAKDTVYLQMNSLKPEDTARYSCIYCRYDGEFAYWGQGTLVTVS

SEQ ID NO: 4354 - protein, 119 aa, synthetic construct
VKLEESGGGSVQAGESLRLSCTAPGFTSNSCGMDWYRQAPGKEREFVASINTDGTTSYADSVKGRFTVSKDKAKDTVYLQMNSLKPEDTAVYFCAASPRQLGPYYAMDYWGQGTSVTVS

SEQ ID NO: 4355 - protein, 114 aa, synthetic construct
VKLEESGGGSVQAGESLRLSCTAPGFTSNSCGMDWYRQAPGKEREFVASINTDGTTSYADSVKGRFTVSKDKAKDTVYLQMNSLKPEDTAVYYCNGGWSLAMDYWGQGTSVTVS

SEQ ID NO: 4356 - protein, 119 aa, synthetic construct
VKLEESGGGSVQAGESLRLSCTAPGFTSNSCGMDWYRQAPGKEREFVASINTDGTTSYADSVKGRFTVSKDKAKDTVYLQMNSLKPEETAVYYCYAQGYDYDEGYGMDYWGQGTSVTVS

SEQ ID NO: 4357 - protein, 115 aa, synthetic construct
VKLEESGGGSVQAGESLRLSCTAPGFTSNSCGMDWYRQAPGKEREFVASINTDGTTSYADSVKGRFTVSKDKAKDTVYLQMNSMKPEDTAMYSCIYCRYDGEFAYWGQGTLVTVS

SEQ ID NO: 4358 - protein, 115 aa, synthetic construct
VKLEESGGGSVQAGESLRLSCTAPGFTSNSCGMDWYRQAPGKEREFVASINTDGTTSYADSVKGRFTVSKDKAKDTVYLQMNSVKPEDTAMYSCIYCRYDGEFAYWGQGTLVTVS

SEQ ID NO: 4359 - protein, 115 aa, synthetic construct
VKLEESGGGSVQAGESLRLSCTAPGFTSNSCGMDWYRQAPGKEREFVASINTDGTTSYADSVKGRFTVSKDKAKDTVYLQTNSLKPEDTAMYSCIYCRYDGEFAYWGQGTLVTVS

SEQ ID NO: 4360 - protein, 115 aa, synthetic construct
VKLEESGGGSVQAGESLRLSCTAPGFTSNSCGMDWYRQAPGKEREFVASINTDGTTSYVDSVKGRFTVSKDKAKDTVYLQMNSLKPEDTAMYSCIYCRYDGEFAYWGQGTLVTVS

SEQ ID NO: 4361 - protein, 115 aa, synthetic construct
VKLEESGGGSVQAGESLRLSCTAPGFTSNSCGMEWYRQAPGKEREFVASINTDGTTSYADSVKGRFTVSKDKAKDTVYLQMNSLKPEDTAMYSCIYCRYDGEFAYWGQGTLVTVS

SEQ ID NO: 4362 - protein, 115 aa, synthetic construct
VKLEESGGGSVQAGESLRLSCTAPGFTSNSCGVDWYRQAPGKEREFVASINTDGTTSYADSVKGRFTVSKDKAKDTVYLQMNSLKPEDTAMYSCIYCRYDGEFAYWGQGTLVTVS

SEQ ID NO: 4363 - protein, 115 aa, synthetic construct
VKLEESGGGSVQAGESLRLSCTAPGFTSNSCSMDWYRQAPGKEREFVASINTDGTTSYADSVKGRFTVSKDKAKDTVYLQMNSLKPEDTAMYSCIYCRYDGEFAYWGQGTLVTVS

SEQ ID NO: 4364 - protein, 115 aa, synthetic construct
VKLEESGGGSVQAGESLRLSSTAPGFTSNSCGMDWYRQAPGKEREFVASINTDGTTSYADSVKGRFTVSKDKAKDTVYLQMNSLKPEDTAMYSCIYCRYDGEFAYWGQGTLVTVS

SEQ ID NO: 4365 - protein, 115 aa, synthetic construct
VKLEESGGGSVRAGESLRLSCTAPGFTSNSCGMDWYRQAPGKEREFVASINTDGTTSYADSVKGRFTVSKDKAKDTVYLQMNSLKPEDTAMYSCIYCRYDGEFAYWGQGTLVTVS

SEQ ID NO: 4366 - protein, 115 aa, synthetic construct
VNLEESGGGSVQAGESLRLSCTAPGFTSNSCGMDWYRQAPGKEREFVASINTDGTTSYADSVKGRFTVSKDKAKDTVYLQMNSLKPEDTAMYSCIYCRYDGEFAYWGQGTLVTVS

SEQ ID NO: 4367 - protein, 115 aa, synthetic construct
VQLEESGGGSVQAGESLRLSCTAPGFTSNSCGMDWYRQAPGKEREFVASINTDGTTSYADSVKGRFTVSKDKAKDTVYLQMNSLKPEDTAMYSCIYCRYDGEFAYWGQGTLVTVS

SEQ ID NO: 4368 - protein, 115 aa, synthetic construct
VQLVESGGGLVQPGGSLRLSCAASGSMFSINAVAWYRQAPGKEREFVASINTDGTTSYADSVKGRFTVSKDKAKDTVYLQMNSLKPEDTAMYSCIYCRYDGEFAYWGQGTLVTVS

SEQ ID NO: 4369 - protein, 115 aa, synthetic construct
VQLVESGGGLVQPGGSLRLSCTAPGFTSNSCGMDWYRQAPGKEREFVASINTDGTTSYADSVKGRFTVSKDKAKDTVYLQMNSLKPEDTAMYSCIYCRYDGEFAYWGQGTLVTVS

SEQ ID NO: 4370 - protein, 8 aa, synthetic construct
CFTFDDSD

SEQ ID NO: 4371 - protein, 8 aa, synthetic construct
DFTFDDSD

SEQ ID NO: 4372 - protein, 8 aa, synthetic construct
GCTFDDSD

SEQ ID NO: 4373 - protein, 8 aa, synthetic construct
GFAFDDSD

SEQ ID NO: 4374 - protein, 8 aa, synthetic construct
GFIFDDSD

SEQ ID NO: 4375 - protein, 8 aa, synthetic construct
GFSFDDSD

SEQ ID NO: 4376 - protein, 8 aa, synthetic construct
GFTCDDSD

SEQ ID NO: 4377 - protein, 8 aa, synthetic construct
GFTFADSD

SEQ ID NO: 4378 - protein, 8 aa, synthetic construct
GFTFDDLD

SEQ ID NO: 4379 - protein, 8 aa, synthetic construct
GFTFDDPD

SEQ ID NO: 4380 - protein, 8 aa, synthetic construct
GFTFDDSA

SEQ ID NO: 4381 - protein, 8 aa, synthetic construct
GFTFDDSE

SEQ ID NO: 4382 - protein, 8 aa, synthetic construct
GFTFDDSG

SEQ ID NO: 4383 - protein, 8 aa, synthetic construct
GFTFDDSN

SEQ ID NO: 4384 - protein, 8 aa, synthetic construct
GFTFDDSV

SEQ ID NO: 4385 - protein, 8 aa, synthetic construct
GFTFDDSY

SEQ ID NO: 4386 - protein, 8 aa, synthetic construct
GFTFDESD

SEQ ID NO: 4387 - protein, 8 aa, synthetic construct
GFTFDGSD

SEQ ID NO: 4388 - protein, 8 aa, synthetic construct
GFTFDNSD

SEQ ID NO: 4389 - protein, 8 aa, synthetic construct
GFTFDYSD

SEQ ID NO: 4390 - protein, 8 aa, synthetic construct
GFTFEDSD

SEQ ID NO: 4391 - protein, 8 aa, synthetic construct
GFTFGDSD

SEQ ID NO: 4392 - protein, 8 aa, synthetic construct
GFTFNDSD

SEQ ID NO: 4393 - protein, 8 aa, synthetic construct
GFTFVDSD

SEQ ID NO: 4394 - protein, 8 aa, synthetic construct
GFTFYDSD

SEQ ID NO: 4395 - protein, 8 aa, synthetic construct
GFTIDDSD

SEQ ID NO: 4396 - protein, 8 aa, synthetic construct
GFTLDDSD

SEQ ID NO: 4397 - protein, 8 aa, synthetic construct
GFTSDDSD

SEQ ID NO: 4398 - protein, 8 aa, synthetic construct
GFTVDDSD

SEQ ID NO: 4399 - protein, 8 aa, synthetic construct
GFTYDDSD

SEQ ID NO: 4400 - protein, 8 aa, synthetic construct
GLTFDDSD

SEQ ID NO: 4401 - protein, 8 aa, synthetic construct
GSTFDDSD

SEQ ID NO: 4402 - protein, 8 aa, synthetic construct
SFTFDDSD

SEQ ID NO: 4403 - protein, 8 aa, synthetic construct
VFTFDDSD

SEQ ID NO: 4404 - protein, 8 aa, synthetic construct
GFTFDDAD

SEQ ID NO: 4405 - protein, 8 aa, synthetic construct
GRTSSSFG

SEQ ID NO: 4406 - protein, 8 aa, synthetic construct
GRTFSSYP

SEQ ID NO: 4407 - protein, 8 aa, synthetic construct
GLNFSSYP

SEQ ID NO: 4408 - protein, 8 aa, synthetic construct
GRNFSSYA

SEQ ID NO: 4409 - protein, 8 aa, synthetic construct
GFTSNSCS

SEQ ID NO: 4410 - protein, 6 aa, synthetic construct
SSDGST

SEQ ID NO: 4411 - protein, 8 aa, synthetic construct
IISSDGST

SEQ ID NO: 4412 - protein, 8 aa, synthetic construct
TIPSDGST

SEQ ID NO: 4413 - protein, 8 aa, synthetic construct
TISGDGST

SEQ ID NO: 4414 - protein, 7 aa, synthetic construct
ISIDGST

SEQ ID NO: 4415 - protein, 8 aa, synthetic construct
TISRDGST

SEQ ID NO: 4416 - protein, 8 aa, synthetic construct
TISSDDST

SEQ ID NO: 4417 - protein, 8 aa, synthetic construct
TISSDGGT

SEQ ID NO: 4418 - protein, 8 aa, synthetic construct
TISSDGIT

SEQ ID NO: 4419 - protein, 8 aa, synthetic construct
TISSDGNT

SEQ ID NO: 4420 - protein, 8 aa, synthetic construct
TISSDGSI

SEQ ID NO: 4421 - protein, 8 aa, synthetic construct
TISSDGSS

SEQ ID NO: 4422 - protein, 8 aa, synthetic construct
TISSDSST

SEQ ID NO: 4423 - protein, 8 aa, synthetic construct
TISSGGST

SEQ ID NO: 4424 - protein, 7 aa, synthetic construct
ISSNGST

SEQ ID NO: 4425 - protein, 8 aa, synthetic construct
TISSYGST

SEQ ID NO: 4426 - protein, 8 aa, synthetic construct
TITSDGST

SEQ ID NO: 4427 - protein, 8 aa, synthetic construct
TTSSDGST

SEQ ID NO: 4428 - protein, 8 aa, synthetic construct
ISWSGGNT

SEQ ID NO: 4429 - protein, 8 aa, synthetic construct
ICWSGGRT

SEQ ID NO: 4430 - protein, 8 aa, synthetic construct
ISSDGRTL

SEQ ID NO: 4431 - protein, 8 aa, synthetic construct
IRSDGRTL

SEQ ID NO: 4432 - protein, 8 aa, synthetic construct
TVSGDGRT

SEQ ID NO: 4433 - protein, 7 aa, synthetic construct
INTDGTT

SEQ ID NO: 4434 - protein, 8 aa, synthetic construct
SINTDGTT

SEQ ID NO: 4435 - protein, 9 aa, synthetic construct
GTMASRIGC

SEQ ID NO: 4436 - protein, 9 aa, synthetic construct
ITMASRIGC

SEQ ID NO: 4437 - protein, 9 aa, synthetic construct
KTMASRIGC

SEQ ID NO: 4438 - protein, 9 aa, synthetic construct
RAMASRIGC

SEQ ID NO: 4439 - protein, 9 aa, synthetic construct
RIMASRIGC

SEQ ID NO: 4440 - protein, 9 aa, synthetic construct
RKMASRIGC

SEQ ID NO: 4441 - protein, 9 aa, synthetic construct
RSMASRIGC

SEQ ID NO: 4442 - protein, 9 aa, synthetic construct
RTIASRIGC

SEQ ID NO: 4443 - protein, 9 aa, synthetic construct
RTKASRIGC

SEQ ID NO: 4444 - protein, 9 aa, synthetic construct
RTMALRIGC

SEQ ID NO: 4445 - protein, 9 aa, synthetic construct
RTMAPRIGC

SEQ ID NO: 4446 - protein, 9 aa, synthetic construct
RTMASGIGC

SEQ ID NO: 4447 - protein, 9 aa, synthetic construct
RTMASMIGC

SEQ ID NO: 4448 - protein, 9 aa, synthetic construct
RTMASRIDC

SEQ ID NO: 4449 - protein, 9 aa, synthetic construct
RTMASRIGF

SEQ ID NO: 4450 - protein, 9 aa, synthetic construct
RTMASRIGG

SEQ ID NO: 4451 - protein, 9 aa, synthetic construct
RTMASRIGR

SEQ ID NO: 4452 - protein, 9 aa, synthetic construct
RTMASRIGY

SEQ ID NO: 4453 - protein, 9 aa, synthetic construct
RTMASRISC

SEQ ID NO: 4454 - protein, 9 aa, synthetic construct
RTMASRLGC

SEQ ID NO: 4455 - protein, 9 aa, synthetic construct
RTMASRMGG

SEQ ID NO: 4456 - protein, 9 aa, synthetic construct
RTMASSIGC

SEQ ID NO: 4457 - protein, 9 aa, synthetic construct
RTMASWIGC

SEQ ID NO: 4458 - protein, 9 aa, synthetic construct
RTMATRIGC

SEQ ID NO: 4459 - protein, 9 aa, synthetic construct
RTMDSRIGC

SEQ ID NO: 4460 - protein, 9 aa, synthetic construct
RTMSSRIGC

SEQ ID NO: 4461 - protein, 9 aa, synthetic construct
RTMTSRIGC

SEQ ID NO: 4462 - protein, 9 aa, synthetic construct
RTMVSRIGC

SEQ ID NO: 4463 - protein, 9 aa, synthetic construct
RTTASRIGC

SEQ ID NO: 4464 - protein, 19 aa, synthetic construct
AAEGDDYIMVTTTGYGMDY

SEQ ID NO: 4465 - protein, 19 aa, synthetic construct
AAEGDDYIMVTTTGYVMDY

SEQ ID NO: 4466 - protein, 19 aa, synthetic construct
AAEGDDYIMVTTTGYAMDY

SEQ ID NO: 4467 - protein, 19 aa, synthetic construct
AAEGDDYITVTTTGYVMDY

SEQ ID NO: 4468 - protein, 11 aa, synthetic construct
TYCRYDGEFAY

SEQ ID NO: 4469 - protein, 11 aa, synthetic construct
IYCRFDGEFAY

SEQ ID NO: 4470 - protein, 11 aa, synthetic construct
IYCRHDGEFAY

SEQ ID NO: 4471 - protein, 11 aa, synthetic construct
IYCRYDGELAY

SEQ ID NO: 4472 - protein, 11 aa, synthetic construct
IYFRYDGEFAY

SEQ ID NO: 4473 - protein, 11 aa, synthetic construct
IYWRYDGEFAY

SEQ ID NO: 4474 - protein, 11 aa, synthetic construct
SYCRYDGEFAY

SEQ ID NO: 4475 - protein, 11 aa, synthetic construct
VYCRYDGEFAY

SEQ ID NO: 4476 - protein, 120 aa, synthetic construct; identical to SEQ ID NO: 59

What is claimed is:

1. A VH-heavy chain only (VHH) polypeptide or an antigen binding portion thereof that specifically binds to mesothelin, wherein the binding protein or the antigen binding portion thereof comprises three Complementarity Determining Regions (CDRs): CDR1, CDR2 and CDR3, which are structurally positioned between four camelid VHH framework (FR) regions (FR1-FR4) as follows: FR1-CDR1-FR2-CDR2-FR3-CDR3-FR4; wherein the three CDRs are selected from:
CDR1 comprising the amino acid sequence GRTFSSYA (SEQ ID NO: 1); CDR2 comprising the amino acid sequence ICWSGGNT (SEQ ID NO: 2); and CDR3 comprising the amino acid sequence NERTTVLPTGAMDY (SEQ ID NO: 3);
CDR1 comprising the amino acid sequence GSMFSINA (SEQ ID NO: 4); CDR2 comprising the amino acid sequence MTSGGST (SEQ ID NO: 5); and CDR3 comprising the amino acid sequence NGGWSLAMDY (SEQ ID NO: 6);
CDR1 comprising the amino acid sequence GFTLDYYA (SEQ ID NO: 7); CDR2 comprising the amino acid sequence ISSSGGST (SEQ ID NO: 8); and CDR3 comprising the amino acid sequence AAAGGYGNSSRY (SEQ ID NO: 9);
CDR1 comprising the amino acid sequence GSIFSVNA (SEQ ID NO: 10); CDR2 comprising the amino acid sequence INTGGGST (SEQ ID NO: 11); and CDR3 comprising the amino acid sequence AAEDFGNSKTY (SEQ ID NO: 12);
CDR1 comprising the amino acid sequence GFPYFSCC (SEQ ID NO: 13); CDR2 comprising the amino acid sequence ISSDGST (SEQ ID NO: 14); and CDR3 comprising the amino acid sequence AASPRQLGPYYAMDY (SEQ ID NO: 15);
CDR1 comprising the amino acid sequence GFTLDNYA (SEQ ID NO: 16); CDR2 comprising the amino acid sequence ISSSGGST (SEQ ID NO: 8); and CDR3 comprising the amino acid sequence AGVGDYGRRA (SEQ ID NO: 17); and
CDR1 comprising the amino acid sequence GFTFDDSD (SEQ ID NO: 18); CDR2 comprising the amino acid sequence ISSDGST (SEQ ID NO: 14); and CDR3 comprising the amino acid sequence RTMASRIGC (SEQ ID NO: 19).

2. The VHH polypeptide of claim 1, wherein
i) FR1 comprises the following amino acid sequence:
X₁X₂QLVESGGGX₃VQX₄GX₅X₆LRLX₇CX₈AS (SEQ ID NO: 20), wherein
X₁ is E, D, or Q,
X₂ is V or L,
X₃ is L or S,
X₄ is A or P,
X₅ is E or G,
X₆ is S or T,
X₇ is S or T, and
X₈ is A, T, or V;
ii) FR2 comprises the following amino acid sequence:
XₐX_{b}X₁₃X₁₄RQX₁₅X₁₆X₁₇X₁₈X₁₉X₂₀X₂₁X₂₂VX₂₃X_{c}, wherein
Xₐ is I, M, or V,
X_{b} is A, G, or S,
X₁₃ is W or Y,
X₁₄ is F, H, or Y,
X₁₅ is A, I, or X,
X₁₆ is P or S,
X₁₇ is G or T,
X₁₈ is D, K, or E,
X₁₉ is D, E, or Q,
X₂₀ is C or R,
X₂₁ is E or N,
X₂₂ is F, G, L, or P,
X₂₃ is S or A, and
X_{c} is A, S, T, or Y;
iii) FR3 comprises the following amino acid sequence:
X_{d}YAXₑX_{f}VX_{g}GRFTX₂₄SX₂₅X₂₆X₂₇AX₂₈X₂₉X₃₀X₃₁X₃₂LQMX₃₃SLKX₃₄EDT X₃₅X₃₆YX₃₇C (SEQ ID NO: 21), wherein
X_{d} is F, H, I, N, or Y,
Xₑ is A or D,
X_{f} is S or T,
X_{g} is K or R,
X₂₄ is I or V,
X₂₅ is G, K, R, Q, or W,
X₂₆ is D or G,
X₂₇ is N or T,
X₂₈ is K, N, or R,
X₂₉ is N, H, or Q,
X₃₀ is T or S,
X₃₁ is V or L,
X₃₂ is F or Y,
X₃₃ is N, S, or T,
X₃₄ is P or S,
X₃₅ is A or G,
X₃₆ is I or V, and
X₃₇ is F, I, S, or Y; and
iv) FR4 comprises the following amino acid sequence:
X₄₀GQGTX₄₁VTVX₄₂X₄₃ (SEQ ID NO: 22), wherein
X₄₀ is M or W,
X₄₁ is L or S,
X₄₂ is null or S, and
X₄₃ is null or S.

3. The VHH polypeptide of claim 1, wherein the polypeptide binds a mesothelin antigen with a K_{d} of less than 12 nM.

4. A polypeptide that specifically binds to mesothelin, wherein the polypeptide or a mesothelin-binding portion thereof has at least 85% amino acid sequence identity to a
(SEQ ID NO: 55)
QVQLVESGGGLVQAGGSLRLSCVASGRTFSSYAMGWFRQSPGKEREFVA
AICWSGGNTYYADSVKGRFTISGDNAKNSVYLQMNSLKPEDTAVYICNE
RTTVLPTGAMDYWGQGTSVTVSS;
(SEQ ID NO: 56)
QVQLVESGGGLVQPGGSLRLSCAASGSMFSINAVAWYRQAPGEQREPVA
AMTSGGSTIYADSVKGRFTISRDNAKNTVYLQMSSLKPEDTAVYYCNGG
WSLAMDYWGQGTSVTVS;
(SEQ ID NO: 57)
QLQLVESGGGLVQPGGSLRLSCAASGFTLDYYAIGWFRQAPGKEREGVS
YISSSGGSTNYADSVKGRFTISRDNAKNTVYLQMNSLKPEDTGVYSCAA
AGGYGNSSRYWGQGTSVTVS;
(SEQ ID NO: 58)
QVQLVESGGGLVQPGGSLRLSCAASGSIFSVNAMGYYRQISTKQRNLVA
AINTGGGSTYYADSVKGRFTISWDNANNTLFLQMNSLKSEDTAVYYCAA
EDFGNSKTYWGQGTLVTVS;
(SEQ ID NO: 4476)
DVQLVESGGGLVQAGGSLRLSCAASGFPYFSCCMSWHRQAPGKDRELVS
SISSDGSTHYADSVRGRFTISKGNARNTLYLQMNSLKPEDTAVYFCAAS
PRQLGPYYAMDYWGQGTSVTVS;
(SEQ ID NO: 60)
QLQLVESGGGLVQPGGSLRLSCAASGFTLDNYAIGWFRQAPGKEREGVS
SISSSGGSTNYADSVKGRFTVSRDNAKHTVYLQMNSLKPEDTAVYYCAG
VGDYGRRAMGQGTSVTVS;
(SEQ ID NO: 61)
EVQLVESGGGSVQAGETLRLSCTASGFTFDDSDMGWYRQAPGDECELVS
TISSDGSTNYADSVKGRFTISQDNAKNTVYLQMTSLKPEDTAIYSCRTM
ASRIGCWGQGTLVTVS.

5. A chimeric antigen receptor polypeptide (CAR) comprising the polypeptide of claim 1.

6. The CAR of claim 5, wherein the polypeptide comprises an amino acid sequence with at least about 85% identity to one of the following sequences:
(SEQ ID NO: 23)
MLRLLLALNLFPSIQVTGGQVQLVESGGGLVQPGGSLRLSCAASGSMFSINAVAWYRQAPGE
QREPVAAMTSGGSTIYADSVKGRFTISRDNAKNTVYLQMSSLKPEDTAVYYCNGGWSLAMDY
WGQGTSVTVSPTPAPTIASQPLSLRPEACRPAAGGAVHTRGLDFACDPSKPFWVLVVVGGVL
ACYSLLVTVAFIIFWVRKRGRKKLLYIFKQPFMRPVQTTQEEDGCSCRFPEEEEGGCELASL
RVKFSRSADAPAYQQGQNQLYNELNLGRREEYDVLDKRRGRDPEMGGKPQRRKNPQEGLYNE
LQKDKMAEAYSEIGMKGERRRGKGHDGLYQGLSTATKDTYDALHMQALPPRAS;
(SEQ ID NO: 24)
MLRLLLALNLFPSIQVTGGQVQLVESGGGLVQPGGSLRLSCAASGSIFSVNAMGYYRQISTK
QRNLVAAINTGGGSTYYADSVKGRFTISWDNANNTLFLQMNSLKSEDTAVYYCAAEDFGNSK
TYWGQGTLVTVSPTPAPTIASQPLSLRPEACRPAAGGAVHTRGLDFACDPSKPFWVLVVVGG
VLACYSLLVTVAFIIFWVRKRGRKKLLYIFKQPFMRPVQTTQEEDGCSCRFPEEEEGGCELA
SLRVKFSRSADAPAYQQGQNQLYNELNLGRREEYDVLDKRRGRDPEMGGKPQRRKNPQEGLY
NELQKDKMAEAYSEIGMKGERRRGKGHDGLYQGLSTATKDTYDALHMQALPPRAS;
(SEQ ID NO: 25)
MLRLLLALNLFPSIQVTGGDVQLVESGGGLVQAGGSLRLSCAASGFPYFSCCMSWHRQAPGK
DRELVSSISSDGSTHYADSVRGRFTISKGNARNTLYLQMNSLKPEDTAVYFCAASPRQLGPY
YAMDYWGQGTSVTVSPTPAPTIASQPLSLRPEACRPAAGGAVHTRGLDFACDPSKPFWVLVV
VGGVLACYSLLVTVAFIIFWVRKRGRKKLLYIFKQPFMRPVQTTQEEDGCSCRFPEEEEGGC
ELASLRVKFSRSADAPAYQQGQNQLYNELNLGRREEYDVLDKRRGRDPEMGGKPQRRKNPQE
GLYNELQKDKMAEAYSEIGMKGERRRGKGHDGLYQGLSTATKDTYDALHMQALPPRAS;
(SEQ ID NO: 26)
MLRLLLALNLFPSIQVTGGQLQLVESGGGLVQPGGSLRLSCAASGFTLDNYAIGWFRQAPGK
EREGVSSISSSGGSTNYADSVKGRFTVSRDNAKHTVYLQMNSLKPEDTAVYYCAGVGDYGRR
AMGQGTSVTVSPTPAPTIASQPLSLRPEACRPAAGGAVHTRGLDFACDPSKPFWVLVVVGGV
LACYSLLVTVAFIIFWVRKRGRKKLLYIFKQPFMRPVQTTQEEDGCSCRFPEEEEGGCELAS
LRVKFSRSADAPAYQQGQNQLYNELNLGRREEYDVLDKRRGRDPEMGGKPQRRKNPQEGLYN
ELQKDKMAEAYSEIGMKGERRRGKGHDGLYQGLSTATKDTYDALHMQALPPRAS;
(SEQ ID NO: 27)
MLRLLLALNLFPSIQVTGGQLQLVESGGGLVQPGGSLRLSCAASGFTLDYYAIGWFRQAPGK
EREGVSYISSSGGSTNYADSVKGRFTISRDNAKNTVYLQMNSLKPEDTGVYSCAAAGGYGNS
SRYWGQGTSVTVSPTPAPTIASQPLSLRPEACRPAAGGAVHTRGLDFACDPSKPFWVLVVVG
GVLACYSLLVTVAFIIFWVRKRGRKKLLYIFKQPFMRPVQTTQEEDGCSCRFPEEEEGGCEL
ASLRVKFSRSADAPAYQQGQNQLYNELNLGRREEYDVLDKRRGRDPEMGGKPQRRKNPQEGL
YNELQKDKMAEAYSEIGMKGERRRGKGHDGLYQGLSTATKDTYDALHMQALPPRAS;
(SEQ ID NO: 28)
MLRLLLALNLFPSIQVTGGEVQLVESGGGSVQAGETLRLSCTASGFTFDDSDMGWYRQAPGD
ECELVSTISSDGSTNYADSVKGRFTISQDNAKNTVYLQMTSLKPEDTAIYSCRTMASRIGCW
GQGTLVTVSPTPAPTIASQPLSLRPEACRPAAGGAVHTRGLDFACDPSKPFWVLVVVGGVLA
CYSLLVTVAFIIFWVRKRGRKKLLYIFKQPFMRPVQTTQEEDGCSCRFPEEEEGGCELASLR
VKFSRSADAPAYQQGQNQLYNELNLGRREEYDVLDKRRGRDPEMGGKPQRRKNPQEGLYNEL
QKDKMAEAYSEIGMKGERRRGKGHDGLYQGLSTATKDTYDALHMQALPPRAS;
and
(SEQ ID NO: 29)
MLRLLLALNLFPSIQVTGGQVQLVESGGGLVQAGGSLRLSCVASGRTFSSYAMGWFRQSPGK
EREFVAAICWSGGNTYYADSVKGRFTISGDNAKNSVYLQMNSLKPEDTAVYICNERTTVLPT
GAMDYWGQGTSVTVSSPTPAPTIASQPLSLRPEACRPAAGGAVHTRGLDFACDPSKPFWVLV
VVGGVLACYSLLVTVAFIIFWVRKRGRKKLLYIFKQPFMRPVQTTQEEDGCSCRFPEEEEGG
CELASLRVKFSRSADAPAYQQGQNQLYNELNLGRREEYDVLDKRRGRDPEMGGKPQRRKNPQ
EGLYNELQKDKMAEAYSEIGMKGERRRGKGHDGLYQGLSTATKDTYDALHMQALPPRAS.

7. The CAR of claim 5, wherein the CAR comprises in order from N-terminus to C-terminus a CD28 signal peptide, the polypeptide of claim 1, a CD8 hinge domain, a CD28 transmembrane domain, a CD28 cytoplasmic domain, and a CD3ζ domain.

8. A polynucleotide encoding the VHH polypeptide of claim 1.

9. The polynucleotide of claim 8, wherein the polynucleotide comprises a sequence that has at least 85% identity to a sequence selected from the group consisting of.
(SEQ ID NO: 69)
CAAGTTCAGCTTGTGGAGTCAGGCGGTGGACTCGTTCAAGCCGGAGGCTCACTGCGGTTGTC
TTGTGTCGCATCTGGTCGAACCTTCTCAAGTTATGCTATGGGGTGGTTCCGCCAGTCTCCTG
GTAAAGAGCGGGAATTTGTCGCAGCAATTTGTTGGTCTGGTGGTAACACTTACTATGCTGAT
TCAGTAAAAGGTCGATTCACCATATCAGGGGATAATGCAAAAAATTCTGTCTATCTCCAAAT
GAACTCTCTGAAGCCTGAAGATACTGCTGTGTATATCTGTAATGAGAGGACTACGGTACTAC
CTACGGGTGCTATGGACTACTGGGGTCAAGGGACCTCAGTCACCGTCTCCTCG;
(SEQ ID NO: 70)
CAAGTTCAGCTTGTCGAGAGTGGTGGAGGATTGGTGCAGCCAGGCGGATCTCTCAGACTTTC
CTGCGCCGCCAGTGGTTCTATGTTTTCCATAAATGCAGTGGCCTGGTACAGGCAAGCACCAG
GCGAGCAAAGGGAACCGGTAGCCGCAATGACCTCTGGAGGTAGTACAATTTACGCTGATAGC
GTCAAGGGACGATTCACAATATCACGAGACAATGCCAAGAACACTGTCTACCTTCAAATGAG
CAGTTTGAAACCTGAGGATACAGCAGTATACTACTGCAATGGAGGATGGTCACTGGCTATGG
ACTACTGGGGTCAAGGAACCTCAGTCACCGTCTCC;
(SEQ ID NO: 71)
CAGCTTCAACTGGTAGAGAGTGGTGGAGGACTTGTTCAGCCTGGAGGGTCCCTTAGACTTAG
TTGCGCTGCCAGTGGGTTCACCCTGGACTACTACGCCATTGGCTGGTTTCGACAGGCCCCAG
GGAAAGAGCGAGAGGGGGTCTCTTACATCAGTAGTTCCGGTGGTTCCACTAACTACGCTGAT
AGTGTGAAGGGGAGGTTTACTATTTCTCGGGATAATGCAAAAAATACCGTGTACCTGCAAAT
GAATAGCCTCAAACCAGAAGACACAGGCGTTTATTCTTGCGCAGCAGCTGGGGGCTATGGTA
ACTCCTCTCGCTACTGGGGTCAAGGAACCTCAGTCACCGTCTCC;
(SEQ ID NO: 72)
CAGGTTCAGCTGGTGGAGTCCGGCGGAGGTCTTGTTCAGCCCGGAGGTTCCCTGCGCCTCTC
TTGTGCAGCTTCTGGTTCCATTTTCTCAGTCAATGCAATGGGCTACTACAGACAAATTTCCA
CAAAGCAGCGCAACTTGGTCGCCGCAATAAATACTGGTGGTGGCTCGACTTATTACGCCGAT
AGTGTCAAAGGACGATTTACTATAAGTTGGGACAACGCAAACAATACTTTGTTCCTCCAAAT
GAATAGCCTCAAATCAGAAGACACTGCCGTCTACTACTGTGCAGCAGAGGACTTTGGTAACT
CGAAAACTTACTGGGGCCAAGGGACTCTGGTCACTGTCTCT;
(SEQ ID NO: 73)
GACGTACAACTTGTGGAATCAGGTGGGGGTCTCGTTCAAGCTGGTGGGTCACTGCGGCTTTC
TTGCGCTGCAAGTGGGTTCCCTTATTTTTCCTGCTGTATGAGCTGGCATCGCCAAGCTCCTG
GAAAAGATCGGGAACTGGTCTCCAGTATTTCATCTGACGGGTCAACACATTACGCTGATAGC
GTCAGGGGGAGGTTTACTATTTCTAAAGGAAATGCAAGAAACACACTCTACCTCCAGATGAA
CAGTCTGAAGCCCGAAGACACCGCCGTGTATTTCTGTGCAGCTTCCCCTAGACAGCTCGGGC
CTTACTATGCTATGGACTACTGGGGTCAAGGAACCTCAGTCACCGTCTCC;
(SEQ ID NO: 74)
CAGCTTCAACTGGTAGAGAGTGGTGGAGGACTTGTTCAGCCTGGAGGGTCCCTTAGACTTAG
TTGCGCTGCCAGTGGGTTCACCCTGGACAACTACGCCATTGGCTGGTTTCGACAGGCCCCAG
GGAAAGAGCGAGAGGGGGTCTCTAGCATCAGTAGTTCCGGTGGTTCCACCAACTATGCTGAT
AGTGTGAAGGGGAGGTTTACTGTTTCTCGGGATAATGCAAAACATACCGTGTACCTGCAAAT
GAATAGCCTCAAACCAGAAGACACAGCCGTCTATTATTGCGCAGGAGTTGGGGACTACGGTA
GAAGGGCGATGGGTCAAGGCACCTCAGTCACCGTCTCC;
and
(SEQ ID NO: 75)
GAAGTTCAGCTTGTTGAATCAGGCGGCGGAAGTGTCCAAGCTGGCGAAACCCTTCGGCTCTC
CTGCACCGCATCCGGCTTCACATTCGATGATTCAGATATGGGCTGGTACAGGCAGGCTCCTG
GTGACGAATGTGAGCTGGTATCCACAATCTCCAGCGATGGCAGCACAAATTATGCTGACTCT
GTTAAAGGGCGATTTACCATCTCTCAAGATAACGCAAAGAACACCGTGTATCTGCAGATGAC
CTCATTGAAGCCAGAGGATACTGCCATATATTCATGCAGAACAATGGCCTCGAGGATTGGTT
GCTGGGGCCAAGGGACTCTGGTCACTGTCTCT.

10. The polynucleotide of claim 8, wherein the polynucleotide comprises a sequence that has at least 85% identity to a sequence selected from the group consisting of:
(SEQ ID NO: 80)
ATGCTCAGGCTGCTCTTGGCTCTCAACTTATTCCCTTCAATTCAAGTAACAGGAGGGCAAGT
TCAGCTTGTCGAGAGTGGTGGAGGATTGGTGCAGCCAGGCGGATCTCTCAGACTTTCCTGCG
CCGCCAGTGGTTCTATGTTTTCCATAAATGCAGTGGCCTGGTACAGGCAAGCACCAGGCGAG
CAAAGGGAACCGGTAGCCGCAATGACCTCTGGAGGTAGTACAATTTACGCTGATAGCGTCAA
GGGACGATTCACAATATCACGAGACAATGCCAAGAACACTGTCTACCTTCAAATGAGCAGTT
TGAAACCTGAGGATACAGCAGTATACTACTGCAATGGAGGATGGTCACTGGCTATGGACTAC
TGGGGTCAAGGAACCTCAGTCACCGTCTCCCCGACGCCAGCGCCAACTATTGCGAGTCAGCC
TCTCAGTCTGCGACCTGAGGCTTGTCGACCAGCAGCCGGAGGCGCAGTGCACACGAGGGGGC
TGGACTTCGCCTGTGATCCTTCTAAGCCCTTTTGGGTGCTGGTGGTGGTTGGTGGAGTCCTG
GCTTGCTATAGCTTGCTAGTAACAGTGGCCTTTATTATTTTCTGGGTGAGGAAACGGGGCAG
AAAGAAACTCCTGTATATATTCAAACAACCATTTATGAGACCAGTACAAACTACTCAAGAGG
AAGATGGCTGTAGCTGCCGATTTCCAGAAGAAGAAGAAGGAGGATGTGAACTGGCTAGCCTG
AGAGTGAAGTTCAGCAGGAGCGCAGACGCCCCCGCGTACCAGCAGGGCCAGAACCAGCTCTA
TAACGAGCTCAATCTAGGACGAAGAGAGGAGTACGATGTTTTGGACAAGAGACGTGGCCGGG
ACCCTGAGATGGGGGGAAAGCCGCAGAGAAGGAAGAACCCTCAGGAAGGCCTGTACAATGAA
CTGCAGAAAGATAAGATGGCGGAGGCCTACAGTGAGATTGGGATGAAAGGCGAGCGCCGGAG
GGGCAAGGGGCACGATGGCCTTTACCAGGGTCTCAGTACAGCCACCAAGGACACCTACGACG
CCCTTCACATGCAGGCCCTGCCCCCTCGCGCTAGC;
(SEQ ID NO: 81)
ATGCTCAGGCTGCTCTTGGCTCTCAACTTATTCCCTTCAATTCAAGTAACAGGAGGGCAGGT
TCAGCTGGTGGAGTCCGGCGGAGGTCTTGTTCAGCCCGGAGGTTCCCTGCGCCTCTCTTGTG
CAGCTTCTGGTTCCATTTTCTCAGTCAATGCAATGGGCTACTACAGACAAATTTCCACAAAG
CAGCGCAACTTGGTCGCCGCAATAAATACTGGTGGTGGCTCGACTTATTACGCCGATAGTGT
CAAAGGACGATTTACTATAAGTTGGGACAACGCAAACAATACTTTGTTCCTCCAAATGAATA
GCCTCAAATCAGAAGACACTGCCGTCTACTACTGTGCAGCAGAGGACTTTGGTAACTCGAAA
ACTTACTGGGGCCAAGGGACTCTGGTCACTGTCTCTCCGACGCCAGCGCCAACTATTGCGAG
TCAGCCTCTCAGTCTGCGACCTGAGGCTTGTCGACCAGCAGCCGGAGGCGCAGTGCACACGA
GGGGGCTGGACTTCGCCTGTGATCCTTCTAAGCCCTTTTGGGTGCTGGTGGTGGTTGGTGGA
GTCCTGGCTTGCTATAGCTTGCTAGTAACAGTGGCCTTTATTATTTTCTGGGTGAGGAAACG
GGGCAGAAAGAAACTCCTGTATATATTCAAACAACCATTTATGAGACCAGTACAAACTACTC
AAGAGGAAGATGGCTGTAGCTGCCGATTTCCAGAAGAAGAAGAAGGAGGATGTGAACTGGCT
AGCCTGAGAGTGAAGTTCAGCAGGAGCGCAGACGCCCCCGCGTACCAGCAGGGCCAGAACCA
GCTCTATAACGAGCTCAATCTAGGACGAAGAGAGGAGTACGATGTTTTGGACAAGAGACGTG
GCCGGGACCCTGAGATGGGGGGAAAGCCGCAGAGAAGGAAGAACCCTCAGGAAGGCCTGTAC
AATGAACTGCAGAAAGATAAGATGGCGGAGGCCTACAGTGAGATTGGGATGAAAGGCGAGCG
CCGGAGGGGCAAGGGGCACGATGGCCTTTACCAGGGTCTCAGTACAGCCACCAAGGACACCT
ACGACGCCCTTCACATGCAGGCCCTGCCCCCTCGCGCTAGC;
(SEQ ID NO: 82)
ATGCTCAGGCTGCTCTTGGCTCTCAACTTATTCCCTTCAATTCAAGTAACAGGAGGGGACGT
ACAACTTGTGGAATCAGGTGGGGGTCTCGTTCAAGCTGGTGGGTCACTGCGGCTTTCTTGCG
CTGCAAGTGGGTTCCCTTATTTTTCCTGCTGTATGAGCTGGCATCGCCAAGCTCCTGGAAAA
GATCGGGAACTGGTCTCCAGTATTTCATCTGACGGGTCAACACATTACGCTGATAGCGTCAG
GGGGAGGTTTACTATTTCTAAAGGAAATGCAAGAAACACACTCTACCTCCAGATGAACAGTC
TGAAGCCCGAAGACACCGCCGTGTATTTCTGTGCAGCTTCCCCTAGACAGCTCGGGCCTTAC
TATGCTATGGACTACTGGGGTCAAGGAACCTCAGTCACCGTCTCCCCGACGCCAGCGCCAAC
TATTGCGAGTCAGCCTCTCAGTCTGCGACCTGAGGCTTGTCGACCAGCAGCCGGAGGCGCAG
TGCACACGAGGGGGCTGGACTTCGCCTGTGATCCTTCTAAGCCCTTTTGGGTGCTGGTGGTG
GTTGGTGGAGTCCTGGCTTGCTATAGCTTGCTAGTAACAGTGGCCTTTATTATTTTCTGGGT
GAGGAAACGGGGCAGAAAGAAACTCCTGTATATATTCAAACAACCATTTATGAGACCAGTAC
AAACTACTCAAGAGGAAGATGGCTGTAGCTGCCGATTTCCAGAAGAAGAAGAAGGAGGATGT
GAACTGGCTAGCCTGAGAGTGAAGTTCAGCAGGAGCGCAGACGCCCCCGCGTACCAGCAGGG
CCAGAACCAGCTCTATAACGAGCTCAATCTAGGACGAAGAGAGGAGTACGATGTTTTGGACA
AGAGACGTGGCCGGGACCCTGAGATGGGGGGAAAGCCGCAGAGAAGGAAGAACCCTCAGGAA
GGCCTGTACAATGAACTGCAGAAAGATAAGATGGCGGAGGCCTACAGTGAGATTGGGATGAA
AGGCGAGCGCCGGAGGGGCAAGGGGCACGATGGCCTTTACCAGGGTCTCAGTACAGCCACCA
AGGACACCTACGACGCCCTTCACATGCAGGCCCTGCCCCCTCGCGCTAGC;
(SEQ ID NO: 83)
ATGCTCAGGCTGCTCTTGGCTCTCAACTTATTCCCTTCAATTCAAGTAACAGGAGGGCAGCT
TCAACTGGTAGAGAGTGGTGGAGGACTTGTTCAGCCTGGAGGGTCCCTTAGACTTAGTTGCG
CTGCCAGTGGGTTCACCCTGGACAACTACGCCATTGGCTGGTTTCGACAGGCCCCAGGGAAA
GAGCGAGAGGGGGTCTCTAGCATCAGTAGTTCCGGTGGTTCCACCAACTATGCTGATAGTGT
GAAGGGGAGGTTTACTGTTTCTCGGGATAATGCAAAACATACCGTGTACCTGCAAATGAATA
GCCTCAAACCAGAAGACACAGCCGTCTATTATTGCGCAGGAGTTGGGGACTACGGTAGAAGG
GCGATGGGTCAAGGCACCTCAGTCACCGTCTCCCCGACGCCAGCGCCAACTATTGCGAGTCA
GCCTCTCAGTCTGCGACCTGAGGCTTGTCGACCAGCAGCCGGAGGCGCAGTGCACACGAGGG
GGCTGGACTTCGCCTGTGATCCTTCTAAGCCCTTTTGGGTGCTGGTGGTGGTTGGTGGAGTC
CTGGCTTGCTATAGCTTGCTAGTAACAGTGGCCTTTATTATTTTCTGGGTGAGGAAACGGGG
CAGAAAGAAACTCCTGTATATATTCAAACAACCATTTATGAGACCAGTACAAACTACTCAAG
AGGAAGATGGCTGTAGCTGCCGATTTCCAGAAGAAGAAGAAGGAGGATGTGAACTGGCTAGC
CTGAGAGTGAAGTTCAGCAGGAGCGCAGACGCCCCCGCGTACCAGCAGGGCCAGAACCAGCT
CTATAACGAGCTCAATCTAGGACGAAGAGAGGAGTACGATGTTTTGGACAAGAGACGTGGCC
GGGACCCTGAGATGGGGGGAAAGCCGCAGAGAAGGAAGAACCCTCAGGAAGGCCTGTACAAT
GAACTGCAGAAAGATAAGATGGCGGAGGCCTACAGTGAGATTGGGATGAAAGGCGAGCGCCG
GAGGGGCAAGGGGCACGATGGCCTTTACCAGGGTCTCAGTACAGCCACCAAGGACACCTACG
ACGCCCTTCACATGCAGGCCCTGCCCCCTCGCGCTAGC;
(SEQ ID NO: 84)
ATGCTCAGGCTGCTCTTGGCTCTCAACTTATTCCCTTCAATTCAAGTAACAGGAGGGCAGCT
TCAACTGGTAGAGAGTGGTGGAGGACTTGTTCAGCCTGGAGGGTCCCTTAGACTTAGTTGCG
CTGCCAGTGGGTTCACCCTGGACTACTACGCCATTGGCTGGTTTCGACAGGCCCCAGGGAAA
GAGCGAGAGGGGGTCTCTTACATCAGTAGTTCCGGTGGTTCCACTAACTACGCTGATAGTGT
GAAGGGGAGGTTTACTATTTCTCGGGATAATGCAAAAAATACCGTGTACCTGCAAATGAATA
GCCTCAAACCAGAAGACACAGGCGTTTATTCTTGCGCAGCAGCTGGGGGCTATGGTAACTCC
TCTCGCTACTGGGGTCAAGGAACCTCAGTCACCGTCTCCCCGACGCCAGCGCCAACTATTGC
GAGTCAGCCTCTCAGTCTGCGACCTGAGGCTTGTCGACCAGCAGCCGGAGGCGCAGTGCACA
CGAGGGGGCTGGACTTCGCCTGTGATCCTTCTAAGCCCTTTTGGGTGCTGGTGGTGGTTGGT
GGAGTCCTGGCTTGCTATAGCTTGCTAGTAACAGTGGCCTTTATTATTTTCTGGGTGAGGAA
ACGGGGCAGAAAGAAACTCCTGTATATATTCAAACAACCATTTATGAGACCAGTACAAACTA
CTCAAGAGGAAGATGGCTGTAGCTGCCGATTTCCAGAAGAAGAAGAAGGAGGATGTGAACTG
GCTAGCCTGAGAGTGAAGTTCAGCAGGAGCGCAGACGCCCCCGCGTACCAGCAGGGCCAGAA
CCAGCTCTATAACGAGCTCAATCTAGGACGAAGAGAGGAGTACGATGTTTTGGACAAGAGAC
GTGGCCGGGACCCTGAGATGGGGGGAAAGCCGCAGAGAAGGAAGAACCCTCAGGAAGGCCTG
TACAATGAACTGCAGAAAGATAAGATGGCGGAGGCCTACAGTGAGATTGGGATGAAAGGCGA
GCGCCGGAGGGGCAAGGGGCACGATGGCCTTTACCAGGGTCTCAGTACAGCCACCAAGGACA
CCTACGACGCCCTTCACATGCAGGCCCTGCCCCCTCGCGCTAGC;
(SEQ ID NO: 85)
ATGCTCAGGCTGCTCTTGGCTCTCAACTTATTCCCTTCAATTCAAGTAACAGGAGGGGAAGT
TCAGCTTGTTGAATCAGGCGGCGGAAGTGTCCAAGCTGGCGAAACCCTTCGGCTCTCCTGCA
CCGCATCCGGCTTCACATTCGATGATTCAGATATGGGCTGGTACAGGCAGGCTCCTGGTGAC
GAATGTGAGCTGGTATCCACAATCTCCAGCGATGGCAGCACAAATTATGCTGACTCTGTTAA
AGGGCGATTTACCATCTCTCAAGATAACGCAAAGAACACCGTGTATCTGCAGATGACCTCAT
TGAAGCCAGAGGATACTGCCATATATTCATGCAGAACAATGGCCTCGAGGATTGGTTGCTGG
GGCCAAGGGACTCTGGTCACTGTCTCTCCGACGCCAGCGCCAACTATTGCGAGTCAGCCTCT
CAGTCTGCGACCTGAGGCTTGTCGACCAGCAGCCGGAGGCGCAGTGCACACGAGGGGGCTGG
ACTTCGCCTGTGATCCTTCTAAGCCCTTTTGGGTGCTGGTGGTGGTTGGTGGAGTCCTGGCT
TGCTATAGCTTGCTAGTAACAGTGGCCTTTATTATTTTCTGGGTGAGGAAACGGGGCAGAAA
GAAACTCCTGTATATATTCAAACAACCATTTATGAGACCAGTACAAACTACTCAAGAGGAAG
ATGGCTGTAGCTGCCGATTTCCAGAAGAAGAAGAAGGAGGATGTGAACTGGCTAGCCTGAGA
GTGAAGTTCAGCAGGAGCGCAGACGCCCCCGCGTACCAGCAGGGCCAGAACCAGCTCTATAA
CGAGCTCAATCTAGGACGAAGAGAGGAGTACGATGTTTTGGACAAGAGACGTGGCCGGGACC
CTGAGATGGGGGGAAAGCCGCAGAGAAGGAAGAACCCTCAGGAAGGCCTGTACAATGAACTG
CAGAAAGATAAGATGGCGGAGGCCTACAGTGAGATTGGGATGAAAGGCGAGCGCCGGAGGGG
CAAGGGGCACGATGGCCTTTACCAGGGTCTCAGTACAGCCACCAAGGACACCTACGACGCCC
TTCACATGCAGGCCCTGCCCCCTCGCGCTAGC;
and
(SEQ ID NO: 86)
ATGCTCAGGCTGCTCTTGGCTCTCAACTTATTCCCTTCAATTCAAGTAACAGGAGGGCAAGT
TCAGCTTGTGGAGTCAGGCGGTGGACTCGTTCAAGCCGGAGGCTCACTGCGGTTGTCTTGTG
TCGCATCTGGTCGAACCTTCTCAAGTTATGCTATGGGGTGGTTCCGCCAGTCTCCTGGTAAA
GAGCGGGAATTTGTCGCAGCAATTTGTTGGTCTGGTGGTAACACTTACTATGCTGATTCAGT
AAAAGGTCGATTCACCATATCAGGGGATAATGCAAAAAATTCTGTCTATCTCCAAATGAACT
CTCTGAAGCCTGAAGATACTGCTGTGTATATCTGTAATGAGAGGACTACGGTACTACCTACG
GGTGCTATGGACTACTGGGGTCAAGGGACCTCAGTCACCGTCTCCTCGCCGACGCCAGCGCC
AACTATTGCGAGTCAGCCTCTCAGTCTGCGACCTGAGGCTTGTCGACCAGCAGCCGGAGGCG
CAGTGCACACGAGGGGGCTGGACTTCGCCTGTGATCCTTCTAAGCCCTTTTGGGTGCTGGTG
GTGGTTGGTGGAGTCCTGGCTTGCTATAGCTTGCTAGTAACAGTGGCCTTTATTATTTTCTG
GGTGAGGAAACGGGGCAGAAAGAAACTCCTGTATATATTCAAACAACCATTTATGAGACCAG
TACAAACTACTCAAGAGGAAGATGGCTGTAGCTGCCGATTTCCAGAAGAAGAAGAAGGAGGA
TGTGAACTGGCTAGCCTGAGAGTGAAGTTCAGCAGGAGCGCAGACGCCCCCGCGTACCAGCA
GGGCCAGAACCAGCTCTATAACGAGCTCAATCTAGGACGAAGAGAGGAGTACGATGTTTTGG
ACAAGAGACGTGGCCGGGACCCTGAGATGGGGGGAAAGCCGCAGAGAAGGAAGAACCCTCAG
GAAGGCCTGTACAATGAACTGCAGAAAGATAAGATGGCGGAGGCCTACAGTGAGATTGGGAT
GAAAGGCGAGCGCCGGAGGGGCAAGGGGCACGATGGCCTTTACCAGGGTCTCAGTACAGCCA
CCAAGGACACCTACGACGCCCTTCACATGCAGGCCCTGCCCCCTCGCGCTAGC.

11. A vector comprising the polynucleotide of claim 8.

12. A cell comprising the polynucleotide of claim 8.

13. A pharmaceutical composition comprising an effective amount of the polypeptide of claim 1, and a pharmaceutically acceptable excipient, carrier, or diluent.

14. A method for treating a subject having a neoplasia, the method comprising administering to the subject the pharmaceutical composition of claim 13.

15. A kit comprising the polypeptide of claim 1, and a container, for use in treating a subject having a neoplasia.

16. A method of detecting mesothelin or a fragment thereof in a sample, the method comprising:
contacting the sample with at least one detectably labeled VHH binding protein or an antigen binding fragment thereof that specifically binds to mesothelin or a peptide thereof, wherein the binding protein or the antigen binding fragment thereof comprises three Complementarity Determining Regions (CDRs), CDR1, CDR2, and CDR3 structurally positioned between four framework (FR) regions (FR1-FR4) as follows: FR1-CDR1-FR2-CDR2-FR3-CDR3-FR4; wherein the three CDRs are selected from:
CDR1 comprising the amino acid sequence GRTFSSYA (SEQ ID NO: 1); CDR2 comprising the amino acid sequence ICWSGGNT (SEQ ID NO: 2); and CDR3 comprising the amino acid sequence NERTTVLPTGAMDY (SEQ ID NO: 3);
CDR1 comprising the amino acid sequence GSMFSINA (SEQ ID NO: 4); CDR2 comprising the amino acid sequence MTSGGST (SEQ ID NO: 5); and CDR3 comprising the amino acid sequence NGGWSLAMDY (SEQ ID NO: 6);
CDR1 comprising the amino acid sequence GFTLDYYA (SEQ ID NO: 7); CDR2 comprising the amino acid sequence ISSSGGST (SEQ ID NO: 8); and CDR3 comprising the amino acid sequence AAAGGYGNSSRY (SEQ ID NO: 9);
CDR1 comprising the amino acid sequence GSIFSVNA (SEQ ID NO: 10); CDR2 comprising the amino acid sequence INTGGGST (SEQ ID NO: 11); and CDR3 comprising the amino acid sequence AAEDFGNSKTY (SEQ ID NO: 12);
CDR1 comprising the amino acid sequence GFPYFSCC (SEQ ID NO: 13); CDR2 comprising the amino acid sequence ISSDGST (SEQ ID NO: 14); and CDR3 comprising the amino acid sequence AASPRQLGPYYAMDY (SEQ ID NO: 15);
CDR1 comprising the amino acid sequence GFTLDNYA (SEQ ID NO: 16); CDR2 comprising the amino acid sequence ISSSGGST (SEQ ID NO: 8); and CDR3 comprising the amino acid sequence AGVGDYGRRA (SEQ ID NO: 17); and
CDR1 comprising the amino acid sequence GFTFDDSD (SEQ ID NO: 18); CDR2 comprising the amino acid sequence ISSDGST (SEQ ID NO: 14); and CDR3 comprising the amino acid sequence RTMASRIGC (SEQ ID NO: 19); and wherein
i) FR1 comprises the following amino acid sequence:
X₁X₂QLVESGGGX₃VQX₄GX₅X₆LRLX₇CX₈AS (SEQ ID NO: 20), wherein
X₁ is E, D, or Q,
X₂ is V or L,
X₃ is L or S,
X₄ is A or P,
X₅ is E or G,
X₆ is S or T,
X₇ is S or T, and
X₈ is A, T, or V;
ii) FR2 comprises the following amino acid sequence:
XₐX_{b}X₁₃X₁₄RQX₁₅X₁₆X₁₇X₁₈X₁₉X₂₀X₂₁X₂₂VX₂₃X_{c}, wherein
Xₐ is I, M, or V,
X_{b} is A, G, or S,
X₁₃ is W or Y,
X₁₄ is F, H, or Y,
X₁₅ is A, I, or X,
X₁₆ is P or S,
X₁₇ is G or T,
X₁₈ is D, K, or E,
X₁₉ is D, E, or Q,
X₂₀ is C or R,
X₂₁ is E or N,
X₂₂ is F, G, L, or P,
X₂₃ is S or A, and
X_{c} is A, S, T, or Y;
iii) FR3 comprises the following amino acid sequence:
X_{d}YAXₑX_{f}VX_{g}GRFTX₂₄SX₂₅X₂₆X₂₇AX₂₈X₂₉X₃₀X₃₁X₃₂LQMX₃₃SLKX₃₄EDT X₃₅X₃₆YX₃₇C (SEQ ID NO: 21), wherein
X_{d} is F, H, I, N, or Y,
Xₑ is A or D,
X_{f} is S or T,
X_{g} is K or R,
X₂₄ is I or V,
X₂₅ is G, K, R, Q, or W,
X₂₆ is D or G,
X₂₇ is N or T,
X₂₈ is K, N, or R,
X₂₉ is N, H, or Q,
X₃₀ is T or S,
X₃₁ is V or L,
X₃₂ is F or Y,
X₃₃ is N, S, or T,
X₃₄ is P or S,
X₃₅ is A or G,
X₃₆ is I or V, and
X₃₇ is F, I, S, or Y; and
iv) FR4 comprises the following amino acid sequence:
X₄₀GQGTX₄₁VTVX₄₂X₄₃ (SEQ ID NO: 22), wherein
X₄₀ is M or W,
X₄₁ is L or S,
X₄₂ is null or S, and
X₄₃ is null or S; and
measuring the level of binding of the binding protein to mesothelin in the sample relative to a control to detect or identify the presence of mesothelin in the sample.

17. A chimeric antigen receptor (CAR) comprising an amino acid sequence with at least about 95% identity to one of the following sequences:
(SEQ ID NO: 23)
MLRLLLALNLFPSIQVTGGQVQLVESGGGLVQPGGSLRLSCAASGSMFSINAVAWYRQAPGE
QREPVAAMTSGGSTIYADSVKGRFTISRDNAKNTVYLQMSSLKPEDTAVYYCNGGWSLAMDY
WGQGTSVTVSPTPAPTIASQPLSLRPEACRPAAGGAVHTRGLDFACDPSKPFWVLVVVGGVL
ACYSLLVTVAFIIFWVRKRGRKKLLYIFKQPFMRPVQTTQEEDGCSCRFPEEEEGGCELASL
RVKFSRSADAPAYQQGQNQLYNELNLGRREEYDVLDKRRGRDPEMGGKPQRRKNPQEGLYNE
LQKDKMAEAYSEIGMKGERRRGKGHDGLYQGLSTATKDTYDALHMQALPPRAS;
(SEQ ID NO: 24)
MLRLLLALNLFPSIQVTGGQVQLVESGGGLVQPGGSLRLSCAASGSIFSVNAMGYYRQISTK
QRNLVAAINTGGGSTYYADSVKGRFTISWDNANNTLFLQMNSLKSEDTAVYYCAAEDFGNSK
TYWGQGTLVTVSPTPAPTIASQPLSLRPEACRPAAGGAVHTRGLDFACDPSKPFWVLVVVGG
VLACYSLLVTVAFIIFWVRKRGRKKLLYIFKQPFMRPVQTTQEEDGCSCRFPEEEEGGCELA
SLRVKFSRSADAPAYQQGQNQLYNELNLGRREEYDVLDKRRGRDPEMGGKPQRRKNPQEGLY
NELQKDKMAEAYSEIGMKGERRRGKGHDGLYQGLSTATKDTYDALHMQALPPRAS;
(SEQ ID NO: 25)
MLRLLLALNLFPSIQVTGGDVQLVESGGGLVQAGGSLRLSCAASGFPYFSCCMSWHRQAPGK
DRELVSSISSDGSTHYADSVRGRFTISKGNARNTLYLQMNSLKPEDTAVYFCAASPRQLGPY
YAMDYWGQGTSVTVSPTPAPTIASQPLSLRPEACRPAAGGAVHTRGLDFACDPSKPFWVLVV
VGGVLACYSLLVTVAFIIFWVRKRGRKKLLYIFKQPFMRPVQTTQEEDGCSCRFPEEEEGGC
ELASLRVKFSRSADAPAYQQGQNQLYNELNLGRREEYDVLDKRRGRDPEMGGKPQRRKNPQE
GLYNELQKDKMAEAYSEIGMKGERRRGKGHDGLYQGLSTATKDTYDALHMQALPPRAS;
(SEQ ID NO: 26)
MLRLLLALNLFPSIQVTGGQLQLVESGGGLVQPGGSLRLSCAASGFTLDNYAIGWFRQAPGK
EREGVSSISSSGGSTNYADSVKGRFTVSRDNAKHTVYLQMNSLKPEDTAVYYCAGVGDYGRR
AMGQGTSVTVSPTPAPTIASQPLSLRPEACRPAAGGAVHTRGLDFACDPSKPFWVLVVVGGV
LACYSLLVTVAFIIFWVRKRGRKKLLYIFKQPFMRPVQTTQEEDGCSCRFPEEEEGGCELAS
LRVKFSRSADAPAYQQGQNQLYNELNLGRREEYDVLDKRRGRDPEMGGKPQRRKNPQEGLYN
ELQKDKMAEAYSEIGMKGERRRGKGHDGLYQGLSTATKDTYDALHMQALPPRAS;
(SEQ ID NO: 27)
MLRLLLALNLFPSIQVTGGQLQLVESGGGLVQPGGSLRLSCAASGFTLDYYAIGWFRQAPGK
EREGVSYISSSGGSTNYADSVKGRFTISRDNAKNTVYLQMNSLKPEDTGVYSCAAAGGYGNS
SRYWGQGTSVTVSPTPAPTIASQPLSLRPEACRPAAGGAVHTRGLDFACDPSKPFWVLVVVG
GVLACYSLLVTVAFIIFWVRKRGRKKLLYIFKQPFMRPVQTTQEEDGCSCRFPEEEEGGCEL
ASLRVKFSRSADAPAYQQGQNQLYNELNLGRREEYDVLDKRRGRDPEMGGKPQRRKNPQEGL
YNELQKDKMAEAYSEIGMKGERRRGKGHDGLYQGLSTATKDTYDALHMQALPPRAS;
(SEQ ID NO: 28)
MLRLLLALNLFPSIQVTGGEVQLVESGGGSVQAGETLRLSCTASGFTFDDSDMGWYRQAPGD
ECELVSTISSDGSTNYADSVKGRFTISQDNAKNTVYLQMTSLKPEDTAIYSCRTMASRIGCW
GQGTLVTVSPTPAPTIASQPLSLRPEACRPAAGGAVHTRGLDFACDPSKPFWVLVVVGGVLA
CYSLLVTVAFIIFWVRKRGRKKLLYIFKQPFMRPVQTTQEEDGCSCRFPEEEEGGCELASLR
VKFSRSADAPAYQQGQNQLYNELNLGRREEYDVLDKRRGRDPEMGGKPQRRKNPQEGLYNEL
QKDKMAEAYSEIGMKGERRRGKGHDGLYQGLSTATKDTYDALHMQALPPRAS;
and
(SEQ ID NO: 29)
MLRLLLALNLFPSIQVTGGQVQLVESGGGLVQAGGSLRLSCVASGRTFSSYAMGWFRQSPGK
EREFVAAICWSGGNTYYADSVKGRFTISGDNAKNSVYLQMNSLKPEDTAVYICNERTTVLPT
GAMDYWGQGTSVTVSSPTPAPTIASQPLSLRPEACRPAAGGAVHTRGLDFACDPSKPFWVLV
VVGGVLACYSLLVTVAFIIFWVRKRGRKKLLYIFKQPFMRPVQTTQEEDGCSCRFPEEEEGG
CELASLRVKFSRSADAPAYQQGQNQLYNELNLGRREEYDVLDKRRGRDPEMGGKPQRRKNPQ
EGLYNELQKDKMAEAYSEIGMKGERRRGKGHDGLYQGLSTATKDTYDALHMQALPPRAS.

18. A T cell expressing the CAR of claim 17 or a polynucleotide encoding the CAR.

19. A VH-heavy chain only (VHH) polypeptide or an antigen binding portion thereof that specifically binds to mesothelin, wherein the binding protein or the antigen binding portion thereof comprises an amino acid sequence with at least about 95% identity to one of the following sequences:
(SEQ ID NO: 23)
MLRLLLALNLFPSIQVTGGQVQLVESGGGLVQPGGSLRLSCAASGSMFSINAVAWYRQAPGE
QREPVAAMTSGGSTIYADSVKGRFTISRDNAKNTVYLQMSSLKPEDTAVYYCNGGWSLAMDY
WGQGTSVTVSPTPAPTIASQPLSLRPEACRPAAGGAVHTRGLDFACDPSKPFWVLVVVGGVL
ACYSLLVTVAFIIFWVRKRGRKKLLYIFKQPFMRPVQTTQEEDGCSCRFPEEEEGGCELASL
RVKFSRSADAPAYQQGQNQLYNELNLGRREEYDVLDKRRGRDPEMGGKPQRRKNPQEGLYNE
LQKDKMAEAYSEIGMKGERRRGKGHDGLYQGLSTATKDTYDALHMQALPPRAS;
(SEQ ID NO: 24)
MLRLLLALNLFPSIQVTGGQVQLVESGGGLVQPGGSLRLSCAASGSIFSVNAMGYYRQISTK
QRNLVAAINTGGGSTYYADSVKGRFTISWDNANNTLFLQMNSLKSEDTAVYYCAAEDFGNSK
TYWGQGTLVTVSPTPAPTIASQPLSLRPEACRPAAGGAVHTRGLDFACDPSKPFWVLVVVGG
VLACYSLLVTVAFIIFWVRKRGRKKLLYIFKQPFMRPVQTTQEEDGCSCRFPEEEEGGCELA
SLRVKFSRSADAPAYQQGQNQLYNELNLGRREEYDVLDKRRGRDPEMGGKPQRRKNPQEGLY
NELQKDKMAEAYSEIGMKGERRRGKGHDGLYQGLSTATKDTYDALHMQALPPRAS;
(SEQ ID NO: 25)
MLRLLLALNLFPSIQVTGGDVQLVESGGGLVQAGGSLRLSCAASGFPYFSCCMSWHRQAPGK
DRELVSSISSDGSTHYADSVRGRFTISKGNARNTLYLQMNSLKPEDTAVYFCAASPRQLGPY
YAMDYWGQGTSVTVSPTPAPTIASQPLSLRPEACRPAAGGAVHTRGLDFACDPSKPFWVLVV
VGGVLACYSLLVTVAFIIFWVRKRGRKKLLYIFKQPFMRPVQTTQEEDGCSCRFPEEEEGGC
ELASLRVKFSRSADAPAYQQGQNQLYNELNLGRREEYDVLDKRRGRDPEMGGKPQRRKNPQE
GLYNELQKDKMAEAYSEIGMKGERRRGKGHDGLYQGLSTATKDTYDALHMQALPPRAS;
(SEQ ID NO: 26)
MLRLLLALNLFPSIQVTGGQLQLVESGGGLVQPGGSLRLSCAASGFTLDNYAIGWFRQAPGK
EREGVSSISSSGGSTNYADSVKGRFTVSRDNAKHTVYLQMNSLKPEDTAVYYCAGVGDYGRR
AMGQGTSVTVSPTPAPTIASQPLSLRPEACRPAAGGAVHTRGLDFACDPSKPFWVLVVVGGV
LACYSLLVTVAFIIFWVRKRGRKKLLYIFKQPFMRPVQTTQEEDGCSCRFPEEEEGGCELAS
LRVKFSRSADAPAYQQGQNQLYNELNLGRREEYDVLDKRRGRDPEMGGKPQRRKNPQEGLYN
ELQKDKMAEAYSEIGMKGERRRGKGHDGLYQGLSTATKDTYDALHMQALPPRAS;
(SEQ ID NO: 27)
MLRLLLALNLFPSIQVTGGQLQLVESGGGLVQPGGSLRLSCAASGFTLDYYAIGWFRQAPGK
EREGVSYISSSGGSTNYADSVKGRFTISRDNAKNTVYLQMNSLKPEDTGVYSCAAAGGYGNS
SRYWGQGTSVTVSPTPAPTIASQPLSLRPEACRPAAGGAVHTRGLDFACDPSKPFWVLVVVG
GVLACYSLLVTVAFIIFWVRKRGRKKLLYIFKQPFMRPVQTTQEEDGCSCRFPEEEEGGCEL
ASLRVKFSRSADAPAYQQGQNQLYNELNLGRREEYDVLDKRRGRDPEMGGKPQRRKNPQEGL
YNELQKDKMAEAYSEIGMKGERRRGKGHDGLYQGLSTATKDTYDALHMQALPPRAS;
(SEQ ID NO: 28)
MLRLLLALNLFPSIQVTGGEVQLVESGGGSVQAGETLRLSCTASGFTFDDSDMGWYRQAPGD
ECELVSTISSDGSTNYADSVKGRFTISQDNAKNTVYLQMTSLKPEDTAIYSCRTMASRIGCW
GQGTLVTVSPTPAPTIASQPLSLRPEACRPAAGGAVHTRGLDFACDPSKPFWVLVVVGGVLA
CYSLLVTVAFIIFWVRKRGRKKLLYIFKQPFMRPVQTTQEEDGCSCRFPEEEEGGCELASLR
VKFSRSADAPAYQQGQNQLYNELNLGRREEYDVLDKRRGRDPEMGGKPQRRKNPQEGLYNEL
QKDKMAEAYSEIGMKGERRRGKGHDGLYQGLSTATKDTYDALHMQALPPRAS;
and
(SEQ ID NO: 29)
MLRLLLALNLFPSIQVTGGQVQLVESGGGLVQAGGSLRLSCVASGRTFSSYAMGWFRQSPGK
EREFVAAICWSGGNTYYADSVKGRFTISGDNAKNSVYLQMNSLKPEDTAVYICNERTTVLPT
GAMDYWGQGTSVTVSSPTPAPTIASQPLSLRPEACRPAAGGAVHTRGLDFACDPSKPFWVLV
VVGGVLACYSLLVTVAFIIFWVRKRGRKKLLYIFKQPFMRPVQTTQEEDGCSCRFPEEEEGG
CELASLRVKFSRSADAPAYQQGQNQLYNELNLGRREEYDVLDKRRGRDPEMGGKPQRRKNPQ
EGLYNELQKDKMAEAYSEIGMKGERRRGKGHDGLYQGLSTATKDTYDALHMQALPPRAS.
or a polynucleotide encoding the polypeptide.

20. A vector comprising the polynucleotide of claim 19.

21. A VH-heavy chain only (VHH) polypeptide comprising an amino acid sequence having at least 85% sequence identity to a full-length amino acid sequence of any one of Tables 1, 8A to 8G, or 10A to 10M, or a functional fragment thereof, and/or comprising a set of Complementarity Determining Regions: CDR1, CDR2, and CDR3, listed in a row of any one of Tables 3A, 8A to 8G, 10A to 10M, or 11 or a polynucleotide encoding the polypeptide.
